United States Patent Application Publication US 2014/0140959 A1 - sequence listing, part 3

SEQ ID NO: 200 - DNA, 185135 bp, Artificial Sequence
  GLV-2b482
tttttttatgagaccatcaaagagagaaagagaataaaaatatttttgtaaaactttttttatgagaccatcaaagagagaaagagaataaaaatatttttgtaaaactttttttatgagaccatcaaagagagaaagagaataaaaatatttttgtaaaactttttttatgagaccatcaaagagagaaagagaataaaaatatttttgtaaaactttttttatgagaccatcaaagagagaaagagaataaaaatatttttgtaaaactttttttatgagaccatcaaagagagaaagagaataaaaatatttttgtaaaactttttttatgagaccatcaaagagagaaagagaataaaaatatttttgtaaaactttttttatgagaccatcaaagagagaaagagaataaaaatatttttgtaaaactttttttatgagaccatcaaagagagaaagagaataaaaatatttttgtaaaactttttttatgagaccatcaaagagagaaagagaataaaaatatttttgtaaaactttttttatgagaccatcagaaagaggtttaatatttttgtgatactctgaaaggaaataggaataggaataggaatagtgtcataatcgtatcacactattgagacagaaaaagaagaagtcgcgagaggtaactttttgtgaatgtagttaagaacatttttgttttgcaaaccggaatatagtgtccggtacacttttttaattcgtggtgtgcctgaatcgttcgattaaccctactcatccaatttcagatgaatagagttatcgattcagacacacgctttgagttttgttgaatcgatgagtgaagtatcatcggttgcaccttcagatgccgatccgtcgacatacttgaatccatccttgacctcaagttcagatgattccttgcacatgtctccgatacgaacgctaaactctagattcttgacacattttgtatcgacgatcgttgaaccgatgatatcttcgtaactcactttcttatgagagatgttagacccgagtactggatgtcgctgtctttctcttcttcgctacatctgatgtcgatagacacctcacagtctttgatcatagcaagagcttcttcatgagtccttaccttgtcctggggacacgctggacaatctagcattcactgtgtttccatcagcggattctgagatggatttaatctgaggacatttggtgaatccaaagttcattctcagacctccaccgatgatggagtaataagtggtaggaggatctacatcctcgactgatgtggaatcatcttctgattccacctcgggatctggatctgactcggactctgtaatttccgttacggattggcaaatcttatcattggtcggtgtttggtcttgctttgtgactttgataataacatcgattcccatatgatgtttgttttcttcttccgtacacgaggaggaggatgaggatgattgctgaagactggcaggcatagcagctgccgccaggcacatgcatgccaggacgatatattgtttcataattgctattgattgagtactgttctttatgattctacttccttaccgtgcaataaattagaatatattttctacttttacgagaaattaattattgtatttattatttatgggtgaaaaacttactataaaaagtgggtgggtttggaattagtgatcagtttatgtatatcgcaactaccgggcatatggctatcgacatcgagaacattacccacatgataagagattgtatcagtttcgtagtcttgagtattggtattactatatagtatatagatgtcgcccactagagttactgtctccgaatgcggcatgatagtatcattctttgctttcgttaactgtttggaggaagaatctttgttattgcatttaatctcgaaattcagagtgcacacctttctcctgtaaagaaacctgaagtcgctaccttattaagaacggagaagtatccatcacgaaagacgggattacagtctttatgattcatagtaatagttagttccgacgttgagatggattcgctgagaccggtagtggtcgtccgagtacacgacgtgtcgttgacgggatacaggttaatttccacatcgatatagttaaaggtatttctgggtacgggttcgcatttatctgcggaagagacggtgtgagaatatgttccgagaccacacggagaacagatgacgtctccggatactccgtatcctattccacattttgtttgggaaacacatgccttgcatccggatgatcctttgagaagacaataatatccgggagagcattcacagattctattgtgagtcgtgttacacgatcgcgtcttccgttacaacttagacaagcgggtaaatgattattgcgagatgtgaaggtacccgaaccacacggcgtacattgtgtgttagtcttgctatcgcataatctggaagcgtatgttcccggacacaaattatggcgtttgtattcgttgtctttacactttccatcggatggtgcatgcggtgctatatctcttccgtttattattatacatgagagaaacaatatatacgagtataatacggacttcatgatttaataatgtagtaatcgtcgtcttgttcctgtttcctacttctccaatcatatagatattttctttctatcatggataatatttgtaatggttctttccgtacaacatactgtttagatgatattgcgcataatttccggaggcaaatacgatagtctagattgaccgatggtagactctaatttattgagtgctttgtcgacgagtttacttttacgctccatcgatagatggcactgttctatgagatcgtcgtacatgggaaatgaaatgtgtctgtctgaatgtatggctttaagatagctgtgataccgtatacaggtcggtgtcggagattcgaatctctttaaggcgacttatgtcacgatgatggaatctatcttatcgaatgatatatttttcataaatacacttttatagtcctcgtttaaacagaatttactatgtagttccgcgaatgactcgtcccttaataggcagtaggctagtatcttttttacgtagtaatcgtcgtagggagagacatcttgtagaacaacgatttaatcataggtagagatactttcagtctgtggtggatgatgtcattcacaacatccgccttgtatatgatgtttctgttttcaaacaccaagtcgaataccgtctttagtcggaaggttgatgtcgtatccgatgtatgaggcaacattgttgttacaattttgaaaggcggtattatagtattcgtctttctgaatgtcgaacctatctaatagataccgtagtatattgagagtgtatccttgattatgttttatgaatagataaagtagatgttgtccttcttccttttgttcgtgccaattgagtaacattatgagaatatgacctgttgcacaatcgttccatgatgggtgtacaatcaagattattacgtatcctcgtatcggctcctcgagataaaagagcatacaccacacgaggactatgtttggtatactgttgaaggtaagtgtgtaaccgcgttaatgtttgctccataatctattatcgcgtagatgaatcgcttctcggctcgcatcttagtgtgacttaacttgtaataattgctttcgtagaacgtggatatgtgtttacagtagtaatgaagagaagtgagttcatcctcgtcggcgcaattagggtcggatcctttgtacagaacgtaatagtttaagctcccattgaatttatatctaagataacacagcaatagatcggatgatttactaaagtcatcaatggtgtccgttagtatatcaaagatcttgttatcgattgatagtggtcatccttgctatcaaagttacgcatgccgtggtgtaacaatatctttaatacagatggattaaatcgtgtattcatcgtatagcaatgtaatggagagttacctcgtttattcagatcgcagtgtttaataactagcttaaacagatgagacgatgtatccacatcaaagaacgtaaaatacatatgacagacattgttgacagaaacgtgaccttcattcttaccgtcgtccataaatacgttaggtatgtaccacatactgtcgcgaacgatgcgtacaatctcgtccatctcataatgatttactttttcataattaaagatgtgaaagaaaaccgaacaatatatttttttagtaatgtttatgcgagacatataaaataaactccgtgtttatgatgccggtaaatgtttttatcatcttggacggaatcgattttgtaatatgtcatggaaacaaatgaaacaggacattatcgctccatgataaattatttaatggagtaataaagtatctccatgggtaatttcgaaatcaagttatcgtctgtattaatgttgtccactatggagtcgatcctctcattgttctttacagtttctgtaatgatggacgttagttcttttttgtaccatttgatgtcggattctttgcgtatctcaatttgtggcgtttgcttcgtttaaataatatatcaaacatggagacgcctgatatgtagacattcttcattctattaatgtctactctatagcgctttagttccttatgacgaccggcgatatcatactttactttagaaggaaaatcatcatctaggattaaggcgtatctgatacaggcgaataatggttcaggatatagatagcgtatatctctattaaatgcgtcaatcatagtctctagagtgggatggtaactcagtaataaatcaactagcttcgttttgttttctctttggtaactgcttttctggatggccgtattgattatcgagcgtgacactcgctccatattccaataaccgctttgcaaattgtatattattgacatcgaccgcgtaatatagtagagttatcgatcatatctatatcatccatgtacttgcttagtatatcaaatacatctatcagtatggtttcataacagtgatacccgcaattattaaatctcgataatatcagaccgtacatacatagacggccattgttcgatacgtgatttacagccgcgtgtccatattttccacgataaaccttacgacgtttacatcgacgagattattattaacaaagtagtcgtgcagaggatagttgttgtccgttatctaacatgcatcgaacgaccatatcgccgtaatgtaagtagtttatcaacatggcttgtacatcctgttgtctaaatctctttagaatgttatcgatgatgtagtggttatattctctggaatcgtacgaagtaatactacgcattacgtcgacaagagtatgacgtctctcaataagaagattaacgatttccatgtctacattatatggggttactctaaatcgcttgtttagataatatagggctgacgtcgtatactctacacgtgtccacatcctttattaataataatttaacaatctctatatctatggttgagaaagaccagtagtattggatgggtaaagatcctccttcgtctctgccatggatggaaacattgttatcgatcaaacatttaattacatccttggatagagattgagattctctatgagacgatatatagtaatgaagagagttcttacacatatcactgtcgtacatacaggtacgaaatacgtaaccggtgctgtaacattctgatttaagaagccatagcaatacttctggtctcggattaggcgtcgttacgtatatatccaccaatccgagaccattgattgcataattcgtattcttggacggacgtatccgtttatccacaattaggtattttagcagacgtaagtcgatattatccgaatacagatcgaaatcatttatattcgacttgagttcgttagaggaatttgaatagctggatatcagtagatgcacaatctgagattttacgtatctatgcttactgtatactcctagcggagttaatccttcgttgtttctacaaagtctctcgactccgcgagagaacaatcttaatgtctgtatcgcatttattggagacgtaacaatgtagcgcattgtttcctcgtctatctatatgttttgataagttgtgacacgtttcaatttctagttttatttttttgtacgtcacatcttcatccagtagacgacatagaatagtgcactctctaccacaataatccatagctattctggtgctaattattcctatttcacgaaggcaatcattcctcataagatgataaaaagtgtagtggagatttagtatttagcagtgcggatatgatccaagagggtgagatagtcgttctcgttcagaatctttcgcagcataagtagtatgtcgatatacttatcgttgaagactctttataaaagtctatttgtttatatttattgcggatagcagtatttccctataaaaagtatacgtcctgtggtgtctttaatcatgtacatgaatggatggtttatgtagaccttcgtacgatataccatcgaaaagttaatcgtaaatactcctgtaacggccgatgcttctgtatactcctcattaacatctataaacgtcgtatgtagaaatttttctacagtgatagtttcattacacatcttgctaaaatctgcataatatccgaatatattagtaagtcctaaattttctaaaatcggtaccagattatacggttctgtcatttccactttaaactttggcatatacaagtctatacttttagtagataacataccacaccattttttaaatttttcatctgttatatttttttctatgttatatataccttctatgtcgtccggtagtataattaccatactagagtttccctcgtatggaatatcgataatagagaatcctccgaataattcattaatatgtacatattgcaagttattctcggtacccaccatcatatcaacgctggtaactatattcttagaaatataaaacttgtctgtatatgtaagatgtttagaaaatggatatttccacattgctttaaaatggacggcgctaacaactgtcatacgagtattaatggatagcggactagtcaataaggaattaattttaccatttgtcattgtcttaacccattcgttgattagttcctttgtttggttagcattattaaagtttacagtttgaaaatcgtcttttattttttgtaggaaggaggcgtggaactcgatactatcgctaccgtatattttatttgcggtagctagtgtcgcacaatacggaatatctacctccatgtcatcattattgtcatcgggtgtattctcattcatattctctatatattttgatagttgttcagctgtagaaccagctgctccatgatttagaatagataaagtagataaaatagaaactggagaaatcaaaacattttcatccgtgtgttttaagattagttctttaaagatatccatggtatagaccaaacaataacgataacgatatatatcataaataaataatgttaaatttcagtttatgtttgtaccccgtattcatacttaacaaattggtattgcgtacacaatcaatcatattacataccattaataatgcaagcataaaaaattgttagtagatgtttctaaatataggttccgtaagcaaagaatataagaatgaagcggtaatgataaaatcaatcgttatctaaaatgatcatactcatttattttattctattatattaacacatacatttttaacagcaacacattcaatattgtattgttatttttatattatttacacaattaacaatatattattagtttatattactgaattaataatataaaattcccaatcttgtcataaacacacactgagaaacagcataaacacagaatccatcaaaaatgttgataaattatctgatgttgttgttcgctgctatgataatcagatcattcgccgatagtggtaacgctatcgaaacgacattgccagaaattacaaacgctacaacagatattccagctatcagattatgcggtccagagggagatggatattgtttacacggtgactgtatccacgctagagatattgacggtatgtattgtagatgctctcatggttatacaggcattagatgtcagcatgtagtattagtagactatcaacgttcagaaaacccaaacactacaacgtcatatatcccatctcccggtattatgcttgtattagtaggcattattatgtgttgtctattatctgtttataggttcactcgacgaactaaactacctatacaagatatggttgtgccataatttttataaatttttttatgagtatttttacaaaaatgtataaagtgtatgtcttatgtatatttataaaaatgctaagtatgcgatgtatctatgttatttgtatttatctaaacaatacctctacctctagatattatacaaaaattttttatttcggcatattaaagtaaaatctagttaccttgaaaatgaatacagtgggtggttccgtatcaccagtaagaacataatagtcaaatacagtatccgattgagattttgcatacaatactagtctagaaagaaatttgtaatcatcttctgtgacgggagtccatatatctgtatcatcgtctagtttatcagtgtcccatgctatattcctgttatcatcattagttaatgaaaataactctcgtgcttcagaaaagtcaaatattgtatccatacatacatctccaaaactatcgcttatacgtttatctttaacgatacctatacctagatggttatttactaacagacattttccagatctattgactataactcctatagtttccacatcaaccaagtaatgatcatctattgttatataacaataacataactcttttccatttttatcagtatgtatatctatatcaacgtcgtcgttgtagtgaatagtagtcattgatctattatatgaaacggatatgtctagaacggcaattgttttacgtccagttaacactttcgttgatttaaagtctagagtctttgcaaacataatatccttatccgactttatatttcctgtagggtggtataattttattttgcctccacatatcggtgtttccaaatatattactagacaatattccatatagttattagttaagggtacccaattagaacacgtacgcttattatcatcatttggatcgtatttcataaaagttattgtgttatcgatgtcaacacattctacattttttaatcgtctatatagtatttttctgatattttctataatatcagaattgtcttccatcggaagttgtatactatcggaatcagttacatgtttaaataattctctgatgtcattccttatacaatcaaattcattattaaacagtttaatagtctgtagacctttatcgtcgtaaatatccattgtcttattagttacgcttatttttatgtgtttttacgttgctttattatattttataagaatgattgtttgacgaatcacgagaactattaagacacattattaggtatatattataaaaaagtttttgattacgatgttataagaggaaagaggacacattaacatcatacatcaattaactacattcttataacatcgtaatcaaaagaattgcaattttgatgtataacaactgtcaatgggttatggaattgtatattacatattatacggtatgttggtaacgacaaataccggtcggtaattgtctgccggtgtaatagaattatatatatctatctattacaccggccttgtatacataataataagttgtggtagtatgatctccatatttataatttaggactttgtattcagtatttttggaatcataaaaaataaaaaaaagttttactaatttaaaatttaaaaagtatttacatttttttcactgtttagtcgcggatatggaattcgatcctgccaaaatcaatacatcatctatagatcatgtaacaatattacaatacatagatgaaccaaatgatataagactaacagtatgcattatccgaaatattatatcaatatcacaaaaataaatacacatttggctaatcaatttcgggcttggaaaaaacgtatcgccggaagggactatatgactaacttatctagagatacaggaatacaacaatcaaaacttactgaaactatacgtaactgtcaaaaaaatagaaacatatatggtctatatatacactacaatttagttattaattggataaccgatgtgattatcaatcaatattaagagggttggtaaattggtacatagctaataatacctatactccaaatacacccaataatacaacaaccatttctgagttggatatcatcaaaatactggataaatacgaggacgtgtatagagtaagtaaagaaaaagaatgtggaatttgctatgaagttgtttactcaaaacgatagatactttggtttattggattcgtgtactcatatattttgcataacatgcatcaatatatggcatagaacacgaagagaaaccggtgcgtcggataattgtcctatatgccgtacccgttttagaaacataacaatgagcaagttctataagctagttaactaataaataaaaagtttaatttgttgacgacgtatgtcgttattttttctcgtataaaagattaatttgattctaatataatctttagtattggataaatatcaattcaaattaattccattagattatatcataaataaaaatagtagcacgcactacttcagccaaatattcttttttgaaacgccatctatcgtagtgaggacacaagtgaacctataattatcaaatttattagtatcggttacatgaaggactttacgtagagtgacgattccactatctgtggtacgaacggtttcatcttctttgatgccatcacccagatgttctataaacttggtatcctcgtccgatctcatatcctttgccaaccaatacatgtagctaaaattaggcataaatttcacacatcctgaacaatgaaattctccagaagatgttacaatgtctagatttggacatttggtttcaaccgcgttaacatatgagtgaacacacccatacatgaaagcgatgagaaataggattctcatcttgccaaaatatcactagaaaaaatttatttatcagttttaaaggtataaaaaatacttattgttgctcgaatattttgtatttgatggtatacggaagattagaaatgtaggtattatcatcaactgattctatggttttatgtattctatcatgtttcactattgcgttggaaataatatcatatgcttccacatatattttattttgttttaactcataatactcacgtaattctggattattggcatatctatgaataattttagctccatgatcagtaaatattaatgagaacatagtattaccacctaccattatttttttcatctcattcaattcttaattgcaaagatctatataatcattatagcgttgacttatggactctggaatcttagacgatgtacagtcatctataatcatggcatatttaatacattgttttatagcatagtcgttatctacgatgttagatatttctctcaatgaatcaatcacacaatctaatgtaggtttatgacataatagcattttcagcagttcaatgtttttagattcgttgatggcaatggctatacatgtatatccgttatttgatctaatgttgacatctgaaccggattctagcagtaaagatactagagattgtttattatatctaacagccttgtgaagaagtgtttctcctcgtttgtcaatcatgttaatgtctttaagataaggtaggcaaatgtttatagtactaagaattgggcaagcataagacatgtcacaaagacccttttttgtatgtataagtgtaaaaattataacatccatagttggatttacataggtgtccaatcgggatctctccatcatcgagataattgatggcatctcccttccttttttagtagatatttcatcgtgtaagaatcaatattaatatttctaaagtatccgtgtatagcctctttatttaccacagctccatattccactagagggatatcgccgaatgtcatatactcaattagtatatgttggaggacatccgagttcattgttttcaatatcaaagagatggtttccttatcatttctccatagtggtacaatactacacattattccgtgcggctttccattttccaaaaacaatttgaccaaatctaaatctacatctttattgtatctataatcactatttagataatcagccataattcctcgagtgcaacatgttagatcgtctatatatgaataagcagtgttatctattcctttcattaacaatttaacgatgtctatatctatatgagatgacttaatataatattgaagagctgtacaatagtttttatctataaaagacggcttgattccgtgattaattagacatttaacaacttccggacgcacatatgctctcgtatccgactttgaatacagatgagagatgatatacagatgcaatacggtaccgcaatttcgtagttgataatcatcatacgcgtatcagtactcgtcctcataaagaacactgcagccattttctatgaacaaatcaataattttagaaacaggatcattgtcattacataattttctataactgaacgatggttttcacatttaacactcaagtcaaatccatgttctaccaacacctttatcaagtcaacgtctacatttttggatttcatatagctgaatatattaaagttatttatgttgctaaatccagtggcttctagtagagccatcgctatatccttattaactttaacatgtctactatttgtgtattcttctaatggggtaagctgtctccaatttttgcgtaatggattagtgccactgtctagtagtagtttgacgacctcgacattattacaatgctcattaaaaaggtatgcgtgtaaagcattattcttgaattggttcctggtatcattaggatctctgtctttcaacatctgtttaagttcatcaagagccacctcctcattttccaaatagtcaaacattttgactgaatgagctactgtgaactctatacacccacacaactaatgtcattaaatatcatgtcaaaaacttgtacaattattaataaaaataatttagtgtttaaattttaccagttccagattttacacctccgttaatacctccattaaccccactggacgatcctcctccccacattccaccgccaccagatgtataagttttagatcctttattactaccatcatgtccatggataaagacactccacatgccgccactaccccctttagaagacatattaataagacttaaggacaagtttaacaataaaattaatcacgagtaccctactaccaacctacactattatatgattatagtttctatttttacagtaccttgactaaagtttctagtcacaagagcaatactaccaacctacactattatatgattatagtttctatttttataggaacgcgtacgagaaaatcaaatgtctaatttctaacggtagtgttgataaacgattgttatccgcggatacctcctctatcatgtcgtctattttcttactttgttctattaacttattagcattatatattatttgattataaaacttatattgcttattagcccaatctgtaaatatcggattattaacatatcgtttctttgtaggtttatttaacatgtacatcactgtaagcatgtccttaccatttattttaatttgacgcatatccgcaatttctttttcgcagtcggttataaattctatatatgatggatacatgctacatgtgtacttataatcgactaatatgaagtacttgatacatattttcagtaacgatttattattaccacctatgaataagtacctgtgatcgtctaggtaatcaactgttttcttaatacattcgatggttggtaatttactcagaataatttccaatatcttaatatataattctgctatttctgggatatatttatctgccagtataacacaaatagtaatacatgtaaacccatattttgttattatattaatgtctgcgccattatctattaaccattctactaggctgacactatgcgactcaatacaatgataaagtatactacatccatgtttatctattttgtttatatcatcaatatacggcttacaaagttttagtatcgataacacatccaactcacgcatagagaaggtagggaataatggcataatatttattaggttatcatcattgtcattatctacaactaagtttccattttttaaaatatactcgacaactttaggatctctattgccaaatttttgaaaatatttatttatatgcttaaatctatataatgtagctccttcatcaatcatacatttaataacattgatgtatactgtatgataagatacatattctaacaatagatcttgtatagaatctgtatatcttttaagaattgtggatattaggatattattacataaactattacacaattctaaaatataaaacgtatcacggtcgaataatagttgatcaactatataattatcgattttgtgatttttcttcctaaactgtttacgtaaatagttagatagaatattcattagttcatgaccactatagttactatcgaataacgcgtcaaatatttcccgtttaatatcgcatttgtcaagataataatagagtgtggtatgttcacgataagtataataacgcatctctttttcgtgtgaaattaaatagtttattacgtccaaagatgtagcataaccatcttgtgacctagtaataatataataatagagaactgttttacccattctatcatcataatcagtggtgtagtcgtaatcgtaatcgtctaattcatcatcccaattataatattcaccagcacgtctaatctgttctattttgatcttgtatccatactgtatgttgctacatgtaggtattcctttatccaataatagtttaaacacatctacattgggatttgatgttgtagcgtatttttctacaatattaataccatttttgatactatttatttctatacctttcgaaattagtaatttcaataagtctatattgatgttatcagaacatagatattcgaatatatcaaaatcattgatatttttatagtcgactgacgacaataacaaaatcacaacatcgtttttgatattattatttttcttggtaacgtatgcctttaatggagtttcaccatcatactcatataatggatttgcaccactttctatcaatgattgtgcactgctggcatcgatgttaaatgttttacaactatcatagagtatcttatcgttaaccatgattggttgttgatgctatcgcattttttggtttctttcatttcagttatgtatggatttagcacgtttgggaagcatgagctcatatgatttcagtactgtagtgtcagtactattagtttcaataagatcaatctctagatctatagaatcaaaacacgataggtcagaagataatgaatatctgtacgcttcttgttgtactgtaacttctggttttgttagatggttgcatcgtgctttaacgtcaatggtacaaattttatcctcgctttgtgtatcatattcgtccctactataaaattctatattcagattatcatgcgatgtgtatacgctaacggtatcaataaacggagcacaccatttagtcataaccgtaatccaaaaatttttaaagtatatcttaacgaaagaagttgtatcattgtctacggtgtatggtactagatcctcataagtgtatatatctagagtaatgtttaatttattaaatggttgataatatggatcgtcgtggcaatttcctaagatggaaatgagatatagacacgcaataaatctaatcgaagacatggttactccttaaaaaaatacgaataatcaccttggctatttagtaagtgtcatttaacactatactcatattaatccatggactcataatctctatacgggattaacggatgttctatatacggggatgagtagttctcttctttaactttatactttttactaatcatatttagactgatgtatgggtaatagtgtttgaagagctcgttctcatcatcagaataaatcaatatctctgtttttttgttatacagatgtattacagcctcatatattacgtaatagaacgtgtcatctaccttattaactttcaccgcatagttgtttgcaaatacggttaatcctttgacctcgttgatttccgaccaatctgggcgtataatgaatctaaactttaatttcttgtaatcattcgaaataatttttagtttgcatccgtagttatcccctttatgtaactgtaaatttctcaacgcgatatctccattaataatgatgtcgaattcgtgctgtatacccatactgaatggatgaacgaataccgacggcgttaatagtaatttactttttcatctttacatattgggtactagttttactatcataagtttataaattccacaagctactatggaataagccaaccatcttagtataccacacatgtcttaaagtttattaattaattacatgttgttttatatatatcgctacgaatttaaacagagaaatcagtttaggaaaaaaaaaattatctatctacatcatcacgtctctgtattctacgatagagtgctactttaagatgagacatatccgtgtcatcaaaaatatactccattaaaatgattattccggcagcgaacttgatattggatatatcacaacctttgttaatatctacgacaatagacagcagtcccatggttccataaacagtgagtttatctttctttgaagagatattttgtagagatcttataaaactgtcgaatgacatcgcatttatatctttagctaaatcgtatatgttaccatcgtaatatctaaccgcgtctatcttaaacgtttccatcgctttaaagacgtttccgatagatggtctcatttcatcagtcatactgagccaacaaatataatcgtgtataacatctttgatagaatcagactctaaagaaaacgaatcggctttattatacgcattcatgataaacttaatgaaaaatgtttttcgttgtttaagttggatgaatagtatgtcttaataattgttattatttcattaattaatatttagtaacgagtacactctataaaaacgagaatgacataactaatcataactagttatcaaagtgtctaggacgcgtaattttcatatggtatagatcctgtaagcattgtctgtattctggagctattttctctatcgcattagtgagttcagaatatgttataaatttaaatcgaataacgaacataactttagtaaagtcgtctatattaactcttttattttctagccatcgtaataccatgtttaagatagtatattctctagttactacgatctcatcgttgtctagaatatcacatactgaatctacatccaattttagaaattggtctgtgttacatatctcttctatattattgttgatgtattgtcgtagaaaactattacgtagaccattttctttataaaacgaatatatagtactccaattatctttaccgatatatttgcacacataatccattctctcaatcactacatctttaagattttcgttgttaagatatttggctaaactatataattctattagatcatcaacagaatcagtatatatttttctagatccaaagacgaactctttggcgtcctctataatattcccagaaaagatattttcgtgttttagtttatcgagatctgatctgttcatatacgccatgattgtacggtacgttatgataaccgcataaaataaaaatccattttcatttttaaccaatactattcataattgagattgatgtaatactttgttactttgaacgtaaagacagtacacggatccgtatctccaacaagcacgtagtaatcaaatttggtgttgttaaacttcgcaatattcatcaatttagatagaaacttatactcatcatctgttttaggaatccatgtattattaccactttccaacttatcattatcccaggctatgtttcgtccatcatcgttgcgcagagtgaataattcttttgtattcggtagttcaaatatatgatccatgcatagatcggcaaagctattgtagatgtgatttttcctaaatctaatataaaactcgtttactagcaaacactttcctgatttatcgaccaagacacatatggtttctaaatctatcaagtggtggggatccatagttatgacgcagtaacatatattattacattcttgactgtcgctaatatctaaatatttattgttatcgtattggattctgcatatagatggcttgtatgtcaaagatatagaacacataaccaatttatagtcgcgctttacattctcgaatctaaagttaagagatttagaaaacattatatcctcggatgatgttatcactgtttctggagtaggatatattaaagtctttacagatttcgtccgattcaaataaatcactaaataatatcccacattatcatctgttagagtagtatcattaaatctattatattttatgaaagatatatcactgctcacctctatatttcgtacatttttaaactgtttgtataatatctctctgatacaatcagatatatctattgtgtcggtagacgataccgttacatttgaattaatggtgttccattttacaacttttaacaagttgaccaattcatttctaatagtatcaaactctccatgattaaatattttaatagtatccattttatatcactacggacacaaagtagctgacataaaccattgtataatttttatgttttatgtttattagcgtacacattttggaagttccggcttccatgtatttcctggagagcaagtagatgatgaggaaccagatagtttatatccgtacttgcacttaaagtctacattgtcgttgtatgagtatgatcttttaaacccgctagacaagtatccgtttgatattgtaggatgtggacatttaacaatctgacacgtgggtggatcggaccattctcctcctgaacacaggacactagagttaccaatcaacgaatatccactattgcaactataagttacaacgctcccatcggtataaaaatcctcgtatccgttatgtcttccgttggatatagatggaggggattggcatttaacagattcacaaataggtgcctcgggattccataccatagatccagtagatcctaattcacaatacgatttagattcaccgatcaactgatatccgctattacaagagtacgttatactagagccaaagtctactccaccaatatcaagttggccattatcgatatctcgaggcgatgggcatctccgtttaatacattgattaaagagtgtccatccagtacctgtacatttagcatatataggtcccattttttgctttctgtatccaggtagacatagatattctatagtgtctcctatgttgtaattagcattagcatcagtctccacactattcttaaatttcatattaatgggtcgtgacggaatagtacagcatgatagaacgcatcctattcccaacaatgtcaggaacgtcacgctctccaccttcatatttatttatccgtaaaaatgttatcctggacatcgtacaaataataaaaagcccatatatgttcgctattgtagaaattgtttttcacagttgctcaaaaacgatggcagtgacttatgagttacgttacactttggagtctcatctttagtaaacatatcataatattcgatattacgagttgacatatcgaacaaattccaagtatttgattttggataatattcgtattttgcatctgctataattaagatataatcaccgcaagaacacacgaacatctttcctacatggttaaagtacatgtacaattctatccatttgtcttccttaactatatatttgtatagataattacgagtctcgtgagtaattccagtaattacatagatgtcgccgtcgtactctacagcataaactatactatgatgtctaggcatgggagacttttttatccaacgatttttagtgaaacattccacatcgtttaatactacatatttctcatacgtggtataaactccacccattacatatatatcatcgtttacgaataccgacgcgcctgaatatctaggagtaattaagtttggaagtcttatccatttcgaagtgccgtgtttcaaatattctgccacacccgttgaaatagaaaattctaatcctcctattacatataactttccatcgttaacacaagtactaacttctgattttaacgacgacatattagtaaccgttttccattttttcgttttaagatctacccgcgatacggaataaacatgtctattgttaatcatgccgccaataatgtatagacaattatgtaaaacatttgcattatagaattgtctatctgtattaccgactatcgtccaatattctgttctaggagagtaatgggttattgtggatatataatcagagtttttaatgactactatattatgttttataccatttcgtgtcactggctttgtagatttggatatagttaatcccaacaatgatatagcattgcgcatagtattagtcataaacttgggatgtaaaatgttgatgatatctacatcgtttggatttttatgtatccactttaataatatcatagctgtaacatcctcatgatttacgttaacgtcttcgtgggataagatagttgtcagttcatcctttgataattttccaaattctggatcggatgtcaccgcagtaatattgttgattatttctgacatcgacgcattatatagttttttaattccatatcttttagaaaagttaaacatccttatacaatttgtgaaattaatattatgaatcatagtttttacacatagatctactacaggcggaacatcaattattatggcagcaactagtatcatttctacattgtttatggtgatgtttatcttcttccagcgcatatagtctaatagcgattcaaacgcgtgatagtttataccattcaatataatcgcttcatcctttagatggtgatcctgaatgcgtttaaaaaaattatacggagacgccgtaataatttccttattcacttgtataatttccccattgatagaaaatattacgctttccattcttaaagtactataagtaattatagtataatgtaaacgtttatatattcaatatttttataaaaatcattttgacattaattcctttttaaatttccgtctatcatctatagaaacgtattctatgaatttataaaatgcttttacgtgtcctatcgtaggcgatagaaccgctaaaaagcctatcgaatttctacaaaagaatctgttatatggtatagggagagtataaaacattaaatgtccgtacttattaaagtattcagtagccaatcctaactctttcgaatacttattaatggctcttgttctgtacgaatctatttttttgaacaacggacctagtggtatatcttgttctatgtatctaaaataatgtctgactagatccgttagtttaatatccgcagtcatcttgtctagaatggcaaatctaactgcgggtttaggctttagtttagtttctatatctacatctatgtctttatctaacaccaaaaatataatagctaatattttattacaatcatccggatattcttctacgatctcactaactaatgtttctttggttatactagtatagtcactatcggacaaataaagaaaatcagatgatcgatgaataatacatttaaattcatcatctgtaagatttttgagatgtctcattagaatattattagggttagtactcattatcattcggcagctattacttattttattatttttcaccatatagatcaatcattagatcatcaaaatatgtttcaatcatcctaaagagtatggtgaatgactcttcccatctaatttctgaacgttcaccaatgtctctagccactttggcactaatagcgatcattcgcttagcgtcttctatattattaactggttgatttaatctatctagcaatggaccgtcggacagcgtcattctcatgttcttaatcaatgtacatacatcgccgtcatctaccaattcatccaacaacataagctttttaaaatcatcattataataggtttgatcgttgtcatttctccaaagaatatatctaataagtagagtcctcatgcttagttaacaactattttttatgttaaatcaattagtacaccgctatgtttaatacttattcatattttagtttttaggattgagaatcaatacaaaaaattaatgcatcattaattttagaaatacttagtttccacgtagtcaatgaaacatttgaactcatcgtacaggacgttctcgtacaggacgtaactataaaccggtttatatttgttcaagatagatacaaatccgataactttttttacgaattctacgggatccactttaaaagtgtcataccgggttctttttatttttttaaacagatcaatggtgtgatgttgattaggtcttttacgaatttgatatagaatagcgtttacatatcctccataatggtcaatcgccatttgttcgtatgtcataaattctttaattatatgacactgtgtattatttagttcatccttgttcattgttaggaatctatccaaaatggcaattatactagaactataggtgcgttgtatacacatattgatgtgtctgtttatacaatcaatgctactaccttcgggtaaaattgtagcatcatataccatttctagtactttaggttcattattatccattgcagaggacgtcatgatcgaatcataaaaaaatatattatttttatgttattttgttaaaaataatcatcgaatacttcgtaagatactccttcatgaacataatcagttacaaaacgtttatatgaagtaaagtatctacgatttttacaaaagtccggatgcataagtacaaagtacgcgataaacggaataataatagatttatctagtctatctttttctatagctttcatagttagatacatggtctcagaagtaggattatgtaacatcagcttcgataaaatgactgggttatttagtcttacacattcgctcatacatgtatgaccgttaactacagagtctacactaaaatgattgaacaatagatagtctaccattgtttcgtattcagatagtacagcgtagtacatggcatcttcacaaattatatcattgtctaatagatatttgacgcatcttatggatcccacttcaacagccatcttaaaatcggtagaatcatattgctttcctttatcattaataatttctagaacatcatctctatcataaaagatacaaatattaactgtttgatccgtaataacattgctagtcgatagcaatttgttaataagatgcgctgggctcaatgtcttaataagaagtgtaagaggactatctccgaatttgttttgtttattaacatccgttgatggaagtaaaagatctataatgtctacattcttgactgttttagagcatacaatatggagaggtgtatttccatcatgatctggttttgagggactaattcctagtttcatcatccatgagattgtagaagcttttggattgtctgacataagatgtctatgaatatgatttttgccaaatttatccactatcctggcttcgaatccgatggacattatttttttaaacactctttctgaaggatctgtacacgccaacaacggaccacatccttcttcatcaaccgagttgttaatcttggctccatactgtaccaataaatttattctctctatgacttcatcatctgttcccgagagataatatagaggcgttttatgctgtttatcacacgcgtttggatctgcgccgtgcgtcagcagcatcgcgactattctattattattaattttagaagctatatgcaatggataatttccatcatcatccgtctcatttggagagtatcctctatgaagaagttcttcgacaaatcgttcatctagtcctttaattccacaatacgcatgtagaatgtgataattatttccagaaggttcgatagcttgtagcatattcctaaatacatctaaatttttactattatatttggcataaagagatagataatactcggccgacataatgttgtccattgtagtataaaaattaatatttctatttctgtatatttgcaacaatttactctctataacaaatatcataacttagttcttttatgtcaagaaggcactggtttagttcatctataaatgtcacgccataactaccacgcatgccatactcagaattatgataaagatatttatccttggggtgtaggtaatggggattaatctttgttggatcagtctctaagttaacacatgtcacacatgatccatttatagttatatcacacgatgatgatttatgaattgattccggaagatcgctatcgtattttgtggttccacaattcatttccatacatgttattgtcacactaatattatgatgaactttatctagccgctgagtggtaaacaacagaacagatagtttattatctttaccaacaccctcagccgctgccacaaatctctgatccgtatccatgatggtcatgtttatttctagtccgtatccagtcaacactatgttagcatttctgtcgatatagctttcactcatatgacactcaccaataatagtagaattaatgtcgtaatttacaccaatagtgagttcggcggcaaagtaccaataccggtaatcttgtcgaggaggacatatagtattcttgtattctaccgaatacccgagagatgcgatacaaaagagcaagactaatttgtaaaccatcttactcaaaatatgtaacaatagtacgatgcaatgagtaagacaataggaaatctatcttatatacacataattattctatcaattttaccaattagttagtgtaatgttaacaaaaatgtgggagaatctaattagtttttctttacacaattgacgtacatgagtctgagttccttgtttttgctaattatttcatccaatttattattcttgacgatatcgagatcttttgtataggagtcaaacttgtattcaacatgcttttctataatcattttagctatttcggcatcatccaatagtacattttccagattagcagaatagatattaatgtcgtatttgaacagagcctgtaacatctcaatgtctttattatctatagccaatttaatgtccggaatgaagagaagggaattattggtgtttgtcgacgtcatatagtcgagcaagagaatcatcatatccacgtgtccattttttatagtgatgtgaatacaactaaggagaatagccagatcaaaagtagatggtatctctgaaagaaagtaggaaacaatacttacatcattaagcatgacggcatgataaaatgaagttttccatccagttttcccatagaacatcagtctccaatttttcttaacaaacagttttaccgtttgcatgttaccactatcaaccgcataatacaatgcggtgtttcccttgtcatcaaattgtgaatcatccagtccactgaatagcaaaatctttactattttggtatcttccaatgtggctgcctgatgtaatggaaattcattctctagaagatttttcaatgctccagcgttcaacaacgtacatactagacgcacgttattatcagctattgcataatacaaggcactatgtccatggacatccgccttaaatgtatctttactagagagaaagcttttcagctgcttagacttccaagtattaattcgtgacagatccatgtctgaaacgagacgctaattagtgtatattttttcattttttataattttgtcatattgcaccagaattaataatatctttaatagatctgattagtagatacatggctatcgcaaaacaacatatacacatttaataaaaataatatttattaagaaaattcagatttcacgtacccatcaatataaataaaataatgattccttacaccgtacccatattaaggagattccaccttacccataaacaatataaatccagtaatatcatgtctgatgatgaacacaaatggtgtattaaattccagtttttcaggagatgatctcgccgtagctaccataatagtagatgcctctgctacagttccttgttcgtcgacatctatctttgcattctgaaacattttataaatatataatgggtccctagtcatatgtttaaacgacgcattatctggattaaacatactaggagccatcatttcggctatcgacttaatatccctcttattttcgatagaaaatttagggagtttaagattgtacactttattccctaattgagacgaccaatagtctaattttgcagccgtgatagaatctgtgaaatgggtcatattatcacctattgccaggtacatactaatattagcatccttatacggaaggcgtaccatgtcatattctttgtcatcgattgtgattgtatttccttgcaatttagtaactacgttcatcatgggaaccgttttcgtaccgtacttattagtaaaactagcattgcgtgttttagtgatatcaaacggatattgccatatacctttaaaatatatagtattaatgattgcccatagagtattattgtcgagcatattagaatctactacattagacataccggatctacgttctactatagaattaattttattaaccgcatctcgtctaaagtttaatctatataggccgaatctatgatattgttgataatacgacggtttaatgcacacagtattatctacgaaactttgataagttagatcagtgtacgtatatttagatgttttcagcttagctaatcctgatattaattctgtaaatgctggacccagatctctttttctcaaatccatagtcttcaataattctattctagtattacctgatgcaggcaatagcgacataaacatagaaaacgaataaccaaacggtgagaagacaatattatcatcttgaatatttttatacgctactataccggcattggtaaatccttgtagacgataggcggacgctgaacacgctaacgatagtatcaataacgcaatcatgattttatggtattaataattaaccttatttttatgttcggtataaaaaaattattgatgtctacacatccttttgtaattgacatctatatatccttttgtataatcaactctaatcactttaacttttacagttttccctaccagtttatccctatattcaacatatctatccatatgcatcttaacactctctgccaagatagcttcagagtgaggatagtcaaaaagataaatatatagagcataatcattctcgtatactctgccctttattacatcacccgcattgggcaacgaataacaaaatgcaagcatcttgttaacgggctcgtaaattgggataaaaattatgtttttattgtcttatatctattttattcaagagaatattcaggaatttctttttccggttgtatctcgtcgcagtatatatcatttgtacattgtttcatattttttaatagtttacaccttttagtaggactagtatcgtacaattcatagctgtattttgaattccaatcacgcataaaaatatcttccaattgttgacgaagacctaatccatcatccggtgtaatattaatagatgctccacatgtatccgtaaagtaatttcctgtccaatttgaggtacctatataggccgttttatcggttaccatatatttggcatggtttaccctagaatacggaatgggaggatcagcatctggtacaataaatagctttacttctatatttatgtttttagattttagcatagcgatagatcttaaaaagtttctcatgataaacgaagatcgttgccagcaactaatcaatagcttaacggatacttgtctgtctatagcggatcttcttaattcatcttctatataaggccaaaacaaaattttacccgccttcgaataaataatagggataaagttcataacagatacataaacgaatttactcgcatttctaatacatgacaataaagcggttaaatcattggttctttccatagtacatagttgttgcggtgcagaagcaataaatacagagtgtggaacgccgcttacgttaatactaagaggatgatctgtattataatacgacggataaaagtttttccaattatatggtagattgttaactccaagataccagtatacctcaaaaatttgagtgagatccgctgccaagttcctattattgaagatcgcaatacccaattccttgacctgagttagtgatctccaatccatgttagcgcttcctaaataaatatgtgtattatcagatatccaaaattttgtatgaagaactcctcctaggatatttgtaatatctatgtatcgtacttcaactccggccatttgtagtctttcaacatcctttaatggtttgttagatttattaacggctactctaactcgtactcctcttttgggtaattgtacaatctcgtttaatattatcgtgccgaaattcgtacccacttcatccgataaactccaataaaaagatgatatatctagtgtttttgtggtattggatagaatttccctccacatgttaaatgtagacaaatatactttatcaaattgcatacctataggaatagtttctgtaatcactgcgattgtattatccggattcattttatttgttaaaagaataatcctatatcacttcactctattaaaaatccaagtttctatttctttcatgactgattttttaacttcatccgtttccttatgaagatgatgtttggcaccttcataaatttttatttctctattacaatttgcatgttgcatgaaataatatgcacctaaaacatcgctaatcttattgtttgttccctggagtatgagagtcgggggggtgttaatcttggaaattatttttctaaccttgttggtagccttcaagacctgactagcaaatccagccttaattttttcatgattgactaatgggtcgtattggtatttataaactttatccatatctctagatactgattctggacatagctttccgactggcgcatttggtgtgatggttcccataagtttggcagctagcagattcagtcttgaaacagcatctgcattaactagaggagacattagaatcattgctgtaaacaagtttggattatcgtaagaggctagctcccatggaatgacccaataagtagatttaatagttaccacgtgctgtaccaaagtcatcaatcatcattttttcaccattacttcttccatgtccaatatgatcatgtgagaatactaaaattcctaacgatgatatgttttcagctagttcgtcataacgtccagaatgtttaccagctccatgacttatgaatactaatgccttaggatatgtaataggtttccaatatttacaatatatgtaatcattgtccagattgaacatacagtttgcactcatgattcacgttatataactatcaatattaacagttcgtttgatgatcatattatttttatgttttattgataattgtaaaaacatacaattaaatcaatatagaggaaggagacggctactgtcttttgtaagatagtcatggcgactaaattagattatgaggatgctgttttttactttgtggatgatgataaaatatgtagtcgcgactccatcatcgatctaatagatgaatatattacgtggagaaatcatgttatagtgtttaacaaagatattaccagttgtggaagactgtacaaggaattgatgaagttcgatgatgtcgctatacggtactatggtattgataaaattaatgagattgtcgaagctatgagcgaaggagaccactacatcaattttacaaaagtccatgatcaggaaagtttattcgctaccataggaatatgtgctaaaatcactgaacattggggatacaaaaagatttcagaatctagattccaatcattgggaaacattacagatttgatgaccgacgataatataaacatcttgatactttttctagaaaaaaaattgaattgatgatataggggtcttcataacgcataattattacgttagcattctatatccgtgttaaaaaaaattatcctatcatgtatttgagagttttatatgtagcaaacatgatagctgtgatgccaataagctttagatattcacgcgtgctagtgttagggatggtattatctggtggtgaaatgtccgttatataatctacaaaacaatcatcgcatatagtatgcgatagtagagtaaacatttttatagtttttactggattcatacatcgtctacccaattcggttataaatgaaattgtcgccaatcttacacccaaccccttgttatccattagcatagtattaacttcgttatttatgtcataaactgtaaatgattttgtagatgccatatcatacatgatattcatgtccctattataatcattactaactttatcacaatatatgttgataatatctatatatgatctagtctttgtgggcaactgtctatacaagtcgtctaaacgttgtttactcatatagtatcgaacagccatcattacatggtcccgttccgttgatagataatcgagtatgttagtggacttgtcaaatctatataccatattttctggaagtggatatacatagtcgtgatcaacattattgctagcctcatcttctatatcctgtactataccattatctatatcatctacataatctatgatattattacacataaacatcgacaacatactattgtttattatctaagtcctgttgatccaaacccttgatctcctctatttgtactatctagagattgtacttcttccagttctggataatatatacgttgatagattagctgagctattctatctccagtatttacattaaacgtacattttccattattaataagaatgactcctatgtttcccctataatcttcgtctattacaccacctcctatatcaatgccttttagtgacagaccagacctaggagctattctaccatagcagaacttaggcatggacatactaatatctgtcttaattaactgtctttctcctggagggatagtataatcgtaagcgctatacaaatcatatccggcagcacccggcgattgcctagtaggagatttagctctgttagtttccttaacaaatctaactggtgagttaatattcatgttgaacataaaactaatattttatttcaaaattatttaccatcccatatattccatgaataagtgtgatgattgtacacttctatagtatctatatacgatccacgataaaatcctcctatcaatagcagtttattatccactatgatcaattctggattatccctcggataaataggatcatctatcagagtccatgtattgctggattcacaataaaattccgcatttctaccaaccaagaataaccttctaccgaacactaacgcgcatgatttataatgaggataataagtggatggtccaaactgccactgatcatgattgggtagcaaatattctgtagttgtatcagtttcagaatgtcctcccattacgtatataacattgtttatggatgccactgctggattacatctaggtttcagaagactcggcatattaacccaagcagcatccccgtggaaccaacgctcaacagatgtgggatttggtagacctcctactacgtataatttattgttagcgggtatcccgctagcatacagtctggggctattcatcggaggaattggaatccaattgtttgatatataatttaccgctatagcattgttatgtatttcattgttcatccatccaccgatgagatatactacttctccaacatgagtacttgtacacatatggaatatatctataatttgatccatgttcataggatactctatgaatggatacttgtatgatttgcgtggttgtttatcacaatgaaatattttggtacagtctagtatccattttacattatttatacctctgggagaaagataatttgacctgattacatttttgataaggagtagcagatttcctaatttatttcttcgctttatataccacttaatgacaaaatcaactacataatcctcatctggaacatttagttcatcgctttctagaataagtttcatagatagataatcaaaattgtctatgatgtcatcttccagttccaaaaagtgtttggcaataaagtttttagtatgacataagagattggatagtccgtattctatacccatcatgtaacactcgacacaatattcctttctaaaatctcgtaagataaagtttatacaagtgtagatgataaattctacagaggttaatatagaagcacgtaataaattgacgacgttatgactatctatatatacctttccagtatacgagtaaataactatagaagttaaactgtgaatgtcaaggtctagacaaaccctcgtaactggatctttatttttcgtgtatttttgacgtaaatgtgtgcgaaagtaaggagataactttttcaatatcgtagaattgactattatattgcctcctatggcatcaataattgttttgaatttcttagtcatagacaatgctaatatattcttacagtacacagtattgacaaatatcggcatttatgtttctttaaaagtcaacatctagagaaaaatgattatctttttgagacataactcccattttttggtattcacccacacgtttttcgaaaaaattagtttttccttccaatgatatattttccatgaaatcaaacggattggtaacattataaatttttttaaatcccaattcagaaatcaatctatccgcgacgaattctatatatgttttcatcatttcacaattcattcctataagtttaactggaagagccgcagtaagaaattcttgttcaatggatactgcatctgttataatagatctaacggtttcttcactcggtggatgcaataaatgtttaaacatcaaacatgcgaaatcgcagtgcagaccctcgtctctactaattagttcgttggaaaacgtgagtccgggcattaggccacgctttttaagccaaaatatggaagcgaatgatccggaaaagaagattccttctactgcagcaaaggcaataagtctctctccataaccggcgctgtcatgtatccacttttgagcccaatcggccttcttttttacacaaggcatcgtttctatggcattaaagagatagtttttttcattactatctttaacataagtatcgatcaaaagactatacatttccgaatgaatgttttcaatggccatctgaaatccgtagaaacatctagcctcggtaatctgtacttctgtacaaaatcgttccgccaaattttcattcactattccgtcactggctgcaaaaaacgccaatacatgttttataaaatatttttcgtctggtgttagtttattccaatcattgatatctttagatatatctacttcttccactgtccaaaatgatgcctctgcctttttatacatgttccagatgtcatgatattggattgggaaaataacaaatctatttggatttggtgcaaggatgggttccataactaaattaacaataacaataaattttttttcagttatctatatgcctgtacttggattttttgtacatcgatatcgccgcaatcactacaataattacaagtattattgatagcattgttattagtactatcataattaaattatctacattcatgggtgctgaataatcgttattatcatcattatcattttgtaattgtgacatcatactagataaatcgtttgcgagattgttgtgggaagcgggcatggaggatgcattatcattattatttaacgccttccatttggattcacaaatgttacgcacattcaacattttatggaaactataattttgtgaaaacaaataacaagaaaactcgtcatcgttcaaatttttaacgatagtaaaccgattaaacgtcgagctaatttctaacgctagcgactctgttggatatgggtttccagatatatatcttttcagttcccctacgtatctataatcatctgtaggaaatggaagatatttccatttatctactgttcctaatatcatatgtggtggtgtagtagaaccattaagcgcgaaagatgttatttcgcatcgtattttaacttcgcaataatttctggttagataacgcactctaccagtcaagtcaatgatattagcctttacagatatattcatagtagtcgtaacgatgactccatcttttagatgcgatactcctttgtatgtaccagaatcttcgtacctcaaactcgatatatttaaacaagttaatgagatattaacgcgttttatgaatgatgatatataaccagaagttttatcctcggtggctagcgctataaccttatcattataataccaactagtgtgattaatatgtgacacgtcagtgtgggtacaaatatgtacattatcgtctacgtcgtattcgatacatccgcatacagccaacaaatataaaatgacaaatactctaacgccgttcgtacccatcttgatgcggtttaataaatgttttgatttcaatttattgtaaaaaaagattcggttttatactgttcgatattctcattgcttatattttcatctatcatctccacacagtcaaatccgtggttagcatgcacctcatcaaccggtaaaagactatcggactcttctatcattataactctagaatatttaatttggtcattattaatcaagtcaattatcttatttttaacaaacgtgagtattttactcattttttataaaaacttttagaaatatacagactctatcgtgtgtctatatcttctttttatatccaatgtatttatgtctgatttttcttcatttatcatatataatggtccaaattctacacgtgcttcggattcatccagatcattaaggttcttataattgtaacatccttctcttccctcttctacatcttccttcttattcttattcttagcgtcacagaatctaccacagcaggatcccatgacgagcgtcatattaaactaatccattttcaattataatatatgattagtaatgaccattaaaataaaaaatattcttcataaccggcaagaaagtgaaaagttcacattgaaactatgtcagtagtatacatcatgaaatgatgatatatatatactctattttggtggaggattatatgatataattcgtggataatcatttttaagacacatttctttattcgtaaatcttttcacgttaaatgagtgtccatattttgcaatttcttcatatgatggcggtgtacgtggacgaggctgctcctgttcttgttgtggtcgccgactgtcgtgtctgcgtttagatccctccattatcgcgattgcgtagatggagtactattttataccttgtaattaaatttttttattaattaaacgtataaaaacgttccgtatctgtatttaagagccagatttcgtctaatagaacaaatagctacagtaaaaataactagaataattgctacacccactagaaaccacggatcgtaatacggcaatcggttttcgataataggtggaacgtatattttatttaaggacttaacaattgtctgtaaaccacaatttgcttccgcggatcctgtattaactatctgtaaaagcatatgttgaccgggcggagccgaacattctccgatatctaatttctgtatatctataatattattaacctccgcatacgcattacagttcttttctagcttggataccgcactaggtacatcgtctagatctattcctatttcctcagcgatagctcttctatccttttccggaagcaatgaaatcacttcaataaatgattcaaccatgagtgtgaaactaagtcgagaattactcatgcatttgttagttattcggagcgcgcaatttttaaactgtcctataacctctcctatatgaatagcacaagtgacattagtagggatagaatgttgagctaatttttgtaaataactatctataaaaagattatacaaagttttaaactctttagtttccgccatttatccagtctgagaaaatgtctctcataataaatttttccaagaaactaattgggtgaagaatggaaacctttaatctatatttatcacagtctgttttggtacacatgatgaattcttccaatgccgtactaaattcgatatctttttcgatttctggatatgtttttaataaagtatgaacaaagaaatggaaatcgtaataccagttatgtttaactttgaaattgttttttattttcttgttaatgattccagccacttgggaaaagtcaaagtcgtttaatgccgatttaatacgttcattaaaaacaaactttttatcctttagatgaattattattggttcattggaatcaaaaagtaagatattatcgggtttaagatctgcgtgtaaaaagttgtcgcaacagggtagttcgtagattttaatgtataacagagccatctgtaaaaagataaactttatgtattgtaccaaagatttaaatcctaatttgatagctaactcggtatctactttatctgccgaatacagtgctaggggaaaaattataatgtttcctctttcatattcgtagttagttctcttttcatgttcgaaaaagtgaaacatgcggttaaaatagtttataacattaatattactgttaataactgccggataaaagtgggatagtaatttcacgaatttgatactgtcctttctctcgttaaacgcctttaaaaaaactttagaagaatatctcaatgagagttcctgaccatccatagtttgtatcaataatagcaacatatgaagaacacgtttatacagagtatgtaaaaatgttaatttatagtttaatcccatggcccacgcacacacgattaattttttttcatctccctttagattgttgtatagaaatttgggtactgtgaactccgccgtagtttccatgggactatataattttgtggcctcgaatacaaattttactacatagttatctatcttaaagactataccatatcctcctgtagatatgtgataaaaatcgtcgtttataggataaaatcgtttatccttttgttggaaaaaggatgaattaatgtaatcattctcttctatctttagtagtgtttccttattaaaattcttaaaataatttaacaatctaactgacggagcccaattttggtgtaaatctaattgggacattatattgttaaaatacaaacagtctcctaatataacagtatctgataatctatggggagacatccattgatattcaggggatgaatcattggcaacacccatttattgtacaaaaagccccaatttacaaacgaaagtccaggtttgatagagacaaacaattaactattttgtctctgtttttaacacctccacagtttttaatttctttagtaatgaaattattcacaatatcagtatcttctttatctaccagagattttactaacttgataaccttggctgtctcattcaatagggtagtaatatttgtatgtgtgatattgatatctttttgaattgtttcttttagaagtgattctttgatggtgccagcatacgaattacaataatgcagaaactcggttaacatgcaggaattatagtaagccaattccaattgttgcctgtgttgtattagagtgtcaatatgagcaatggtgtccttgcgtttctctgatagaatgcgagcagcgattttggcgttatcatttgacgatatttctggaatgacgaatcctgtttctactaactttttggtaggacaaagtgaaacaatcaagaagatagcttctcctcctatttgtggaagaaattgaactcctctagatgatctactgacgatagtatctccttgacagatattggaccgaattacagaagtacctggaatgtaaagccctgaaaccccctcattttttaagcagattgttgccgtaaatcctgcactatgcccaagatagagagctcctttggtgaatccatctctatgtttcagtttaaccaagaaacagtcagctggtctaaaatttccatctctatctaatacagcatctaacttgatgtcaggaactatgaccggtttaatgttatatgtaacattgagtaaatccttaagttcataatcatcactgtcatcagttatgtacgatccaaacaatgtttctaccggcatagtggatacgaagatgctatccatcagaatgtttccctgattagtattttctatatagctattcttctttaaacgattttccaaatcagtaactatgttcatttttttaggagtaggacgcctagccagtatggaagaggattttctagatcctctcttcaacatctttgatctcgatggaatgcaaaaccccatagtgaaacaaccaacgataaaaataatattgtttttcactttttataattttaccatctgactcatggattcattaatatctttataagagctactaacgtataattctttataactgaactgagatatatacaccggatctatggtttccataattgagtaaatgaatgctcggcaataactaatggcaaatgtatagaacaacgaaattatactagagttgttaaagttaatattttctatgagctgttccaataaattatttgttgtgactgcgttcaagtcataaatcatcttgatactatccagtaaaccgtttttaagttctggaatattatcatcccattgtaaagcccctaattcgactatcgaatatcctgctctgatagcagtttcaatatcgacggacgtcaatactgtaataaaggtggtagtattgtcatcatcgtgataaactacgggaatatggtcgttagtaggtacggtaactttacacaacgcgatatataactttccttttgtaccatttttaacgtagttgggacgtcctgcagggtattgttttgaagaaatgatatcgagaacagatttgatacgatatttgttggattcctgattattcactataatataatctagacagatagatgattcgataaatagagaaggtatatcgttggtaggataatacatccccattccagtattctcggatactctattgatgacactagttaagaacatgtcttctattctagaaaacgaaaacatcctacatggactcattaaaacttctaacgctcctgattgtgtctcgaatgcctcgtacaaggatttcaaggatgccatagattctttgaccaacgatttagaattgcgtttagcatctgatttttttattaaatcgaatggtcggctctctggtttgctaccccaatgataacaatagtcttgtaaagataaaccgcaagaaaatttatacgcatccatccaaataaccctagcaccatcggatgatattaatgtattattatagattttccatccacagttattgggccagtatactgttagcaacggtatatcgaatagattactcatgtaacctactagaatgatagttcgtgtactagtcataatatctttaatccaatctaagaaatttaaaattagattttttacactgttaaagttaacaaaggtattacccggatacgtggatatcatatatggcattggtccattatcagtaatagctccataaactgatacggcgatggtttttatatgtgtttgatctaacgaggaagaaattcgcgcccacaattcatctctagatatgtatttaatatcaaacggtaacacatcaatttcgggacgcgtatatgtttctaaatttttaatccaaatataatgatgacctatatgccctattatcatactgtcaactatagtacacctagagaacttacgatacatctgtttcctgtaatcgttaaattttacaaatctataacatgctaaaccttttgacgacagccattcattaatttctgatatggaatctgtattctcgataccgtatcgttctaaagccagtgctatatctccctgttcgtgggaacgctttcgtataatatcgatcaacggataatctgaagtttttggagaataatatgactcatgatctatttcgtccataaacaatctagacataggaattggaggcgatgatcttaattttgtgcaatgagtcgtcaatcctataacttctaatcttgtaatattcatcatcgacataatactatctatgttatcatcgtatattagtataccatgaccttcttcatttcgtgccaaaatgatatacagtcttaaatagttacgcaatatctcaatagtttcataattgttagctgttttcatcaaggtttgtatcctgtttaacatgatggcgttctataacgtctctattttctatttttaattttttaaatttttaacgatttactgtggctagatacccaatctctctcaaatatttttttagcctcgcttacaagctgtttatctatactattaaaactgacgaatccgtgattttggtaatgggttccgtcgaaatttgccgaagtgatatgaacatattcgtcgtcgactatcaacaattttgtattattctgaatagtgaaaaccttcacagatagatcattttgaacacacaacgcatctagacttttggcggttgccatagaatatacgtcgttcttatcccaattaccaactagaagtctgatcttaactcctctattaatggctgcttctataatggagttgtaaatgtcgggccaatagtagctattaccgtcgacacgtgtagtgggaactatggccaaatgttcaatatctatactagtcttagctgacctgagtttatcaataactacatcggtatctagatctctagaatatcccaataggtgttccggagaatcagtaaagaacactccacctataggattcttaatatgatacgcagtgctaactggcaaacaacaagccgcagagcataaattcaaccatgaattttttgcgctattaaaggctttaaaagtatcaaatcttctacgaagatctgtggccagcgggggataatcagaatatacacctaacgttttaatcgtatgtatagatcctccagtaaatgacgcgtttcctacataacatctttcatcatctgacacccaaaaacaaccgagtagtagtcccacattattttttttatctatattaacggttataaaatttatatccgggcagtgactttgtagctctcccagatttcttttccctcgttcatctagcaaaactattattttaatccctttttcagatgcctcttttagtttatcaaaaataagcgctcccctagtcgtactcagaggattacaacaaaaagatgctatgtatatatatttcttagctagagtgataatttcgttaaaacattcaaatgttgttaaatgatcggatctaaaatccatattttctggtagtgtttctaccagcctacattttgctcccgcaggtaccgatgcaaatggccacatttagttaacataaaaacttatacatcctgttctatcaacgattctagaatatcatcggctatatcgctaaaattttcatcaaagtcgacatcacaacctaactcagtcaatatattaagaagttccatgatgtcatcttcgtctatttctatatccgtatccattgtagattgttgaccgattatcgagtttaaatcattactaatactcaatccttcagaatacaatctgtgtttcattgtaaatttataggcggtgtatttaagttggtagattttcaattatgtattaatatagcaacagtagttcttgctcctccttgattctagcatcctcttcattattttcttctacgtacataaacatgtccaatacgttagacaacacaccgacgatggcggccgctacagacacgaatatgactaaaccgatgaccatttaaaaacccctctctagctttcacttaaactgtatcgatcattcttttagcacatgtataatataaaaacattattctatttcgaatttaggcttccaaaaatttttcatccgtaaaccgataataatatatatagacttgttaatagtcggaataaatagattaatgcttaaactatcatcatctccacgattagagatacaatatttacattctttttgctgtttcgaaactttatcaatacacgttaatacaaacccaggaaggagatattgaaactgaggctgttgaaaatgaaacggtgaatacaataattcagataatgtaaaatcatgattccgtattctgatgatattagaactgctaatggatgtcgatggtatgtatctaggagtatctattttaacaaagcatcgatttgctaatatacaattatccttttgattaattgttattttattcatattcttaaaaggtttcatatttatcaattcttctacattaaaaatttccatttttaatttatgtagccccgcaatactcctcattacgtttcattttttgtctataatatccattttgttcatctcggtacatagattatccaattgagaagcgcatttagtagttttgtacattttaagtttattgacgaatcgtcgaaaactagttatagttaacattttattatttgataccctgatattaatacccctgccgttactattatttataactgatgtaatccacgtaacattggaattaactatcgatagtaatgcatcgacgcttccaaaattgtctattataaactcaccgataatttttttattgcatgttttcatattcattaggattatcaaatctttaatcttattacgattgtatgcgttgatattacaagacgtcattctaaaagacggaggatctccatcaaatgccagacaatcacgtacaaagtacatggaaataggttttgttctattgcgcatcatagatttatatagaacacccgtagaaatactaatttgttttactctataaaatactaatgcatctatttcatcgttttgtataacgtctttccaagtgtcaaattccaaatttttttcattgatagtaccaaattcttctatctctttaactacttgcatagataggtaattacagtgatgcctacatgccgttttttgaaactgaatagatgcgtctagaagcgatgctacgctagtcacaatcaccactttcatatttagaatatatatatgtaaaaatatagtagaatttcattttgtttttttctatgctataaatgaattctcattttgcatctgctcatactccgttttatattaataccaaagaaggaagatatctggttctaaaagccgttaaagtatgcgatgttagaactgtagaatgcgaaggaagtaaagcttcctgcgtactcaaagtagataaaccctcatcgcccgcgtgtgagagaagaccttcgtccccgtccagatgcgagagaatgaataaccctggaaaacaagttccgtttatgaggacggacatgctacaaaatatgttcgcggctaatcgcgataatgtagcttctagacttttgtcctaaaatactattatatccttttcgatattaataaatccgtgtcgtccaggttttttatctctttcagtatgtgaatagataggtattttatctctattcatcatcgaatttaagagatccgataaacattgtttgtattctccagatgtcagcatctgatacaacaatatatgtgcacataaacctctggcacttatttcatgtaccttccccttatcactaaggagaatagtatttgagaaatatgtatacatgatattatcatgaattagatatacagaatttgtaacactctcgaaatcacacgatgtgtcggcgttaagatctaatatatcactcgataacacattttcatctagatacactagacattttttaaagctaaaatagtctttagtagtaacagtaactatgcgattattttcatcgatgatacatttcatcggcatattattacgcttaccatcaaagactataccatgtgtatatctaacgtattctagcatggttgccatacgcgcattaaacttttcaggatctttggatagatcttccaatctatctatttgagaaaacatttttatcatgttcaatagttgaaacgtcggatccactatatagatattatctataaagattttaggaactacgttcatggtatcctggcgaatattaaaactatcaatgatatgattatcgttttcatcttttatcaccatatagtttctaagatatgggattttacttaatataatattatttcccgtgataaattttattagaaaggccaaatctataagaaaagtcctagaattagtctgaagaatatctatatcgccgtatagtatatttggattaattagatatagagaatatgatccgtaacatatacaacttttattatggcgtctaagatattcttccatcaacttattaacatttttgactagggaagatacattatgacgtcccattacttttgccttgtctattactgcgacgttcatagaatttagcatatctcttgccaattcttccattgatgttacattataagaaattttagatgaaattacatttggagctttaatagtaagaactcctaatatgtccgtgtatgtggtcactaatacagattgtagttctataatcgtaaataatttacctatattatatgtttgagtctgtttagaaaagtagctaagtatacgatcttttatttctgatgcagatgtattaacatcggaaaaaaatctttttttattcttttttactaaagatacaaatatgtctttgttaaaaacagttattttctgaatatttctagcttgtaattttaacatatgatattcgttcacactaggtactctgcctaaataggtttctataatctttaatgtaatattaggaaaagtattctgatcaggattcctattcattttgaggatttaaaactctgattattgtctaatatggtctctacgcaaactttttcacagagcgatagagtttttgataactcgtttttcttaagaaatataaaactactgtctccagagctcgctctatcttttattttatctaattcgatacaaactcctgatactggttcagaaagtaattcattaattttcagtcctttatagaagatatttaatatagataatacaaaatcttcagtttttgatatcgatctgattgatcctagaactagatatattaataacgtgctcattaggcagtttatggcagcttgataattagatatagtatattccagttcatatttattagataccgcattgcccagattttgatattctatgaattcctctgaaaataaatccaaaataactagacattctattttttgtggattagtgtactctcttccctctatcatgttcactactggtgtccacgatgataaatatctagagggaatataatatagtccataggatgccaatctagcaatgtcgaataactgtaattttattcttcgctcttcattatgaattgattcttgaggtataaacctaacacaaattatattattagacttttcgtatgtaatgtctttcatgttataagtttttaatcctggaatagaatctattttaatgaggcttttaaacgcagagttctccaacgagtcaaagcataatactctgttgtttttcttatatacgatgttacgattttcttctttgaatggaataggtttttgaattagtttataattacaacataatagataaggaagtgtgcaaatagtacgcggaaaaaacataatagctcccctgttttcatccatggttttaagtaaatgatcactggcttctttagtcaatggatattcgaacattaaccgtttcatcatcattggacagaatccatatttcttaatgtaaagagtgatcaaatcattgtgtttattgtaccatcttgttgtaaatgtgtattcggttatcggatctgctcctttttctattaaagtatcgatgtcgatctcgtctaagaattcaactatatcgacatatttcatttgtatacacataaccattactaacgtagaatgtataggaagagatgtaacgggaacagggtttgttgattcgcaaactattctaatacataattcttctgttaatacgtcttgcacgtaatctattatagatgccaagatatctatataattattttgtaagatgatgttaactatgtgatctatataagtagtgtaataattcatgtatttcgatatatgttccaactctgtctttgtgatgtctagtttcgtaatatctatagcatcctcaaaaaatatattcgcatatattcccaagtcttcagttctatcttctaaaaaatcttcaacgtatggaatataataatctattttacctcttctgatatcattaatgatatagtttttgacactatcttctgtcaattgattcttattcactatatctaagaaacggatagcgtccctaggacgaactactgccattaatatctctattatagcttctggacataattcatctattataccagaattaatgggaactattccgtatctatctaacatagttttaagaaagtcagaatctaagacttgatgttcatatattggttcatacatgaaatgatctctattgatgatagtgactatttcattctctgaaaattggtaactcattctatatatgctttccttgttgatgaaggatagaatatactcaatagaatttgtaccaacaaactgttctcttatgaatcgtatatcatcatctgaaataatcatgtaaggcatacatttaacaattagagacttgtctcctgttatcaatatactattcttgtgataatttatgtgtgaggcaaatttgtccacgttctttaattttgttatagtagatatcaaatccaatggagctacagttcttggcttaaacagatatagtttttctggaacaaattctacaacattattataaaggactttgggtaaataagtgggatgaaatcctattttaattaatgcgatagccttgtcctcgtgcagatatccaaacgcttttgtgatagtatggcattcattgtctagaaacgctctacgaatatctgtgacagatatcatctttagagaatatactagtcgcgttaatagtactacaatttgtattttttaatctatctcaataaaaaaattaatatgtatgattcaatgtataactaaactactaactgttattgataactagaatcagaatctaatgatgacgtacccaagaagtttatctactgccaatttagctgcattatttttagcatctcgtttagattttccatctgccttatcgaatactcttccgtcgatatctacacaggcataaaatgtaggagagttactaggcccaactgattcaatacgaaaagaccaatctctcttagttatttggcagtactcattaataacggtgacagggttagcatctttccaatcaataatttttttagccggaataacatcatcaaaagacttatgatcctctctcattgatttttcgcgggatacatcatctattatgacgtcagccataacatcagcatccggcttatccgcctccgttgtcataaaccaacgaggaggaatatcgtcggagctgtacaccatagcactacgttgaagatcgtacagagctttattaacttctcgcttctccatattaagttgtctagttagttgtgcagcagtagctccttcgattccaatggttttaatagcctcacacacaatctctgcgttagaacgttcgtcgatatagattttagacatttttagagagaactaacacaaccagcaataaaactgaacctactttatcatttttttattcatcatcctctggtggttcgtcgttcctatcaaatgtagctctgattaacccgtcatctataggtgatgctggttctggagattctggaggagatggattattatctggaagaatctctgttatttccttgttttcatgtatcgattgcgttgtaacattaagattgcgaaatgctctaaatttgggaggcttaaagtgttgtttgcaatctctacacgcgtgtctaactagtggaggttcgtcagctgctctagtttgaatcatcatcggcgtagtattcctacttttacagttaggacacggtgtattgtatttctcgtcgagaacgttaaaataatcgttgtaactcacatcctttattttatctatattgtattctactcctttcttaatgcattttataccgaataagagatagcgaaggaattctttttcggtgccgctagtacccttaatcatatcacatagtgttttatattccaaatttgtggcaatagacggtttatttctatacgatagtttgtttctggaatcctttgagtattctataccaatattattctttgattcgaatttagtttcttcgatattagattttgtattacctatattcttgatgtagtactttgatgatttttccatggcccattctattaagtcttccaagttggcatcatccacatattgtgatagtaattctcggatatcagtagcggctaccgccattgatgtttgttcattggatgagtaactactaatgtatacattttccatttataacacttatgtattaactttgttcatttatattttttcattattatgttgatattaacaaaagtgaatatatatatatgttaataattgtattgtggttatacggctacaattttataatgagtgaaagtcagtgtccgatgatcaatgacgatagctttactctgaaaagaaagtatcaaatcgatagtgcggagtcaacaataaaaatggataagaagaggataaagtttcagaatagagccaaaatggtaaaagaaataaatcagacaataagagcagcacaaactcattacgagacattgaaactaggatacataaaatttaagagaatgattaggactactactctagaagatatagcaccatctattccaaataatcagaaaacttataaactattctcggacatttcagccatcggcaaagcatcacagaatccgagtaagatggtatatgctctgctgctttacatgtttcccaatttgtttggagatgatcatagattcattcgttatagaatgcatccaatgagtaaaatcaaacacaagatcttctctcctttcaaacttaatcttattagaatattagtggaagaaagattctataataatgaatgcagatctaataaatggaaaataattggaacacaagttgataaaatgttgatagctgaatctgataaatatacaatagatgcaaggtataacctaaaacccatgtatagaatcaagggagaatctgaagaagataccctcttcatcaaacagatggtagaacaatgtgtgacatcccaggaattggtggaaaaagtgttgaagatactgtttagagatttgttcaagagtggagaatacaaagcgtacagatacgatgatgatgtagaaaatggattcattggattggatacactaaaattaaacattgttcatgatatagttgaaccatgtatgcctgttcgtaggccagtggctaagatactgtgtaaagaaatggtaaataaatactttgagaatccgctacatattattggtaaaaatcttcaagagtgcattgactttgttagtgaataggcatttcatctttctccaatactaattcaaattgttaaattaataatggatagtataaatagttattagttataagatagtaaaaataattattagaataagagtgtagtatcatagataactctcttctataaaaatggattttattcgtagaaagtatcttatatacacagtagaaaataatatagattttttaaaggatgatacattaagtaaagtaaacaattttaccctcaatcatgtactagctctcaagtatctagttagcaattttcctcaacacgttattactaaggatgtattagctaataccaatttttttgttttcatacatatggtacgatgttgtaaagtgtacgaagcggttttacgacacgcatttgatgcacccacgttgtacgttaaagcattgactaagaattatttatcgtttagtaacacaatacaatcgtacaaggaaaccgtgcataaactaacacaagatgaaaaatttttagaggttgccgaatacatggacgaattaggagaacttataggcgtaaattatgacttagttcttaatccattatttcacggaggggaacccatcaaagatatggaaatcatttttttaaaactgtttaagaaaacagacttcaaagttgttaaaaaattaagtgttataagattacttatttgggcatacctaagcaagaaagatacaggcatagagtttgcggataatgatagacaagatatatatactctatttcaacaaactggtagaatcgtccatagcaatctaacagaaacgtttagagattatatctttcccggagataagactagctattgggtgtggttaaacgaaagtatagctaatgatgcggatatcgttcttaatagacacgccattaccatgtatgataaaattcttagttatatatactctgagataaaacaaggacgcgttaataaaaacatgcttaagttagtttatatctttgagcctgaaaaagatatcagagaacttctgctagaaatcatatatgatattcctggagatatcctatctattattgatgcaaaaaacgacgattggaaaaaatattttattagtttttataaagctaattttattaacggtaatacatttattagtgatagaacgtttaacgaggacttattcagagttgttgttcaaatagatcccgaatatttcgataatgaacgaattatgtctttattctctacgagtgctgcggacattaaacgatttgatgagttagatattaataacagttatatatctaatataatttatgaggtgaacgatatcacattagatacaatggatgatatgaagaagtgtcaaatctttaacgaggatacgtcgtattatgttaaggaatacaatacatacctgtttttgcacgagtcggatcccatggtcatagagaacggaatactaaagaaactgtcatctataaaatccaagagtagacggctgaacttgtttagcaaaaacattttaaaatattatttagacggacaattggctcgtctaggtcttgtgttagatgattataaaggagacttgttagttaaaatgataaaccatcttaagtctgtggaggatgtatccgcattcgttcgattttctacagataaaaaccctagtattcttccatcgctaatcaaaactattttagctagttataatatttccatcatcgtcttatttcaaaggtttttgagagataatctatatcatgtagaagaattcttggataaaagcatccatctaaccaagacggataagaaatatatacttcaattgataagacacggtagatcatagaacagaccaaatatattattaataatttggtatatacatagatataattatcacacatttttgataaatgggaactgctgcaacaattcagactcccaccaaattaatgaataaagaaaatgcagaaatgattttggaaaaaattgttgatcatatagttatgtatattagtgacgaatcaagtgattcagaaaataatcctgaatatattgattttcgtaacagatacgaagactatagatctctcattataaaaagtgatcacgagtttgtaaagctatgtaaaaatcatgcggagaaaagttctccagaaacgcaacaaatgattatcaaacacatatacgaacaatatcttattccagtatctgaagtactattaaaacctataatgtccatgggtgacataattacatataacggatgtaaagacaatgaatggatgctagaacaactctctaccctaaactttaacaatctccgcacatggaactcatgtagcataggcaatgtaacgcgtctgttttatacattttttagttatctgatgaaagataaactaaatatataagtataatcccattctaatactttaacctgatgtattagcatcttattagaatattaacctaactaaaagacataacataaaaactcattacatagttgataaaaagcggtaggatataaatattatggctgccaccgttccgcgttttgacgacgtgtacaaaaatgcacaaagaagaattctagatcaagaaacattttttagtagaggtctaagtagaccgttaatgaaaaacacatatctatttgataattacgcgtatggatggataccagaaactgcaatttggagtagtagatacgcaaacttagatgcaagtgactattatcccatttcgttgggattacttaaaaagttcgagtttctcatgtctctatataaaggtcctattccagtatacgaagaaaaagtaaatactgaattcattgctaatggatctttctccggtagatacgtatcatatcttagaaagttttctgctcttccaacaaacgagtttattagttttttgttactgacttccattccaatctataatatcttgttctggtttaaaaatactcagtttgatattactaaacacacattattcagatacgtctatacagataatgccaaacacctggcgttggctaggtatatgtatcaaacaggagactataagcctttgtttagtcgtctcaaagagaattatatatttaccggtcccgttccaatatgtatcaaagatatagatcaccctaatcttagtagagcaagaagtccatccgattatgagacattagctaatattagtactatattgtactttaccaagtatgatccggtattaatgtttttattgttttacgtacctgggtattcaattactacaaaaattactccagccgtagaatatctaatggataaactgaatctaacaaagagcgacgtacaactgttgtaaattattttatgcttcgtaaaatgtaggttttgaaccaaacattctttcaaagaatgagatgcataaaactttattatccaatagattgactatttcggacgtcaatcgtttaaagtaaacttcgtaaaatattctttgatcactgccgagtttaaaacttctatcgataattgtttcatatgttttaatatttacaagttttttggtccatggtccattaggacaaatatatgcaaaataatatcgttctccaagttctatagtctctggattatttttattatattcagtaaccaaatacatattagggttatctgcggatttataatttgagtgatgcattcgactcaacataaataattctagaggagacgatctactatcaaattcggatcgtaaatctgtttctaaagaacggagaatatctatacatacctgattagaattcatccgtccttcagacaacatctcagacagtctggttttgtacatcttaatcatattcttatgaaacttggaaacatctcttctagtttcactagtacctttattaattctctcaggtacagattttgaattcgacgatgctgagtatttcatcgttgtatatttcttcttcgattgcataatcagattcttatataccgcctcaaactctattttaaaattattaaacaatactctattattaatcagtcgttctaactctttcgctatttctatagacttatctacatcttgactgtctatctctgtaaacacggagtcggtatctccatacacgctacgaaaacgaaatctgtaatctataggcaacgatgttttcacaatcggattaatatctctatcgtccatataaaatggattacttaatggattggcaaaccgtaacataccgttagataactctgctccatttagtaccgattctagatacaagatcattctacgtcctatggatgtgcaactcttagccgaagcgtatgagtatagagcactatttctaaatcccatcagaccatatactgagttggctactatcttgtacgtatattgcatggaatcatagatggccttttcagttgaactggtagcctgttttagcatctttttatatctggctctctctgccaaaaatgttcttaatagtctaggaatggttccttctatcgatctatcgaaaattgctatttcagagatgaggttcggtagtctaggttcacaatgaaccgtaatatatctaggaggtggatatttctgaagcaatagctgattatttatttcttcttccaatctattggtactaacaacgacaccgactaatgtttccggagatagatttccaaagatacacacattaggatacagactgttataatcaaagattaatacattattactaaacattttttgttttggagcaaataccttaccgccttcataaggaaacttttgttttgtttctgatctaactaagatagttttagtttccaacaatagctttaacagtggacccttgatgactgtactcgctctatattcgaataccatggattgaggaagcacatatgttgacgcacccgcgtctgtttttgtttctactccataatactcccacaaatactgacacaaacaagcatcatgaatacagtatctagccatatctaaagctatgtttagattataatccttatacatctgagctaaatcaacgtcatcctttccgaaagataatttatatgtatcattaggtaaagtaggacataatagtacgactttaaatccattttcccaaatatctttacgaattactttacatataatatcctcatcaacagtcacataattacctgtggttaaaacctttgcaaatgcagcggctttgcctttcgcgtctgtagtatcgtcaccgatgaacgtcatttctctaactcctctatttaatactttacccatgcaactgaacgcgttcttggatatagaatccaatttgtacgaatccaatttttcaaatttttgaatgaatgaatatagatcgaaaaatatagttccattattgttattaacgtgaaacgtagtattggccatgccgcctactcccttatgactagactgatttctctcataaatacagagatgtacagcttcctttttgtccggagatctaaagataattttctctcctgttaataactctagacgattagtaatatatctcagatcaaagttatgtccgttaaaggtaacgacgtagtcgaacgttagttccaacaattgtttagctattcgtaacaaaactatttcagaacatagaactagttctcgttcgtaatccatttccattagtgactgtatcctcaaacatcctctatcgacggcttcttgtatttcctgttccgttaacatctcttcattaatgagcgtaaacaataatcgtttaccacttaaatcgatataacagtaacttgtatgcgagattgggttaataaatacagaaggaaacttcttatcgaagtgacactctatatctagaaataagtacgatcttgggatatcgaatctaggtatttttttagcgaaacagttacgtggatcgtcacaatgataacatccattgttaatctttgtcaaatattgctcgtccaacgagtaacatccgtctggagatatcccgttagaaatataaaaccaactaatattgagaaattcatccatggtggcattttgtatgctgcgtttctttggctcttctatcaaccacatatctgcgacggagcattttctatctttaatatctagattataacttattgtctcgtcaatgtctatagttctcatctttcccaacggcctcgcattaaatggaggaggagacaatgactgatatatttcgtccgtcactacgtaataaaagtaatgaggaaatcgtataaatacggtctcaccatttcgacatctggatttcagatataaaaatctgttttcaccgtgactttcaaaccaattaatgcaccgaacatccatttatagaatttagaaatatattttcatttaaatgaatcccaaacattggggaagagccgtatggaccattatttttatagtactttcgcaagcgggtttagacggcaacatagaagcgtgtaaacgaaaactatatactatagttagcactcttccatgtcctgcatgtagacggcacgcgactatcgctatagaggacaataatgtcatgtctagcgatgatctgaattatatttattattttttcatcagattatttaacaatttggcatctgatcccaaatacgcgatcgatgtgacaaaggttaaccctttataaacttaacccattataaaacttatgattagtcacaactgaaataaccgcgtgattattttttggtataattctacacggcatggtttctgtgactatgaattcaacccccgttacattagtgaaatctttaacaaacagcaagggttcgtcaaagacataaaactcattgtttacaatcgaaatagaccccctatcacacttaaaataaaaaatatccttatcctttaccaccaaataaaattctgattggtcaatgtgaatgtattcacttaacagttccacaaatttatttattaactccgaggcacatacatcgtcggtattttttatggcaaactttactcttccagcatccgtttctaaaaaaatattaacgagttccatttatatcatccaatattattgaaatgacgttgatggacagatgatacaaataagaaggtacggtacctttgtccaccatctcctccaattcatgctctattttgtcattaactttaatgtatgaaaacagtacgccacatgcttccatgacagtgtgtaacactttggatacaaaatgtttgacattagtataattgttcaagactgtcaatctataatagatagtagctataatatattctatgatggtattgaagaagatgacaaccttggcatattgatcatttaacacagacatggtatcaacagatagcttgaatgaaagagaatcagtaattggaataagcgtcttctcgatagagtgtccgtataccaacatgtctgatattttgatgtattccattaaattatttagttttttctttttattctcgttaaacagcatttctgtcaacggaccccaacatcgttgaccgattaagttttgattgatttttccgtgtaaggcgtatctagtcagatcgtatagcctatccaataatccatcatctgtgcgtagatcacatcgtacactttttaattctctatagaagagcgacagacatctggagcaattacagacagcaatttctttattctctacagatgtaagatacttgaagacattcctatgatgatgcagaattttggataacacggtattgatggtatctgttaccataattcctttgatggctgatagtgtcagagcacaagatttccaatctttgacaatttttagcaccattatctttgttttgatatctatatcagacagcatggtgcgtctgacaacacagggattaagacggaaagatgaaatgattctctcaacatcttcaatagataccttgctattttttctggcattatctatatgtgcgagaatatcctctagagaatcagtatcctttttgatgatagtggatctcaatgacatgggacgtttaaaccttcttattctatcaccagattgcatggtgatttgtcttctttcttttatcataatgtaatctctaaattcatcggcaaattgtctatatctaaaatcataatatgagatgtttacctctacaaatatctgttcgtccaatgttagagtatttacatcagttttgtattccaaattaaacatggcaacggatttaattttatattcctctattaagtcctcgtcgataataacagaatgtagataatcatttaatccatcgtacatggttggaagatgcttgttgacaaaatctttaattgtcttgatgaaggtgggactatatctaacatcttgattaataaaatttataacattgtccataggatactttgtaactagttttatacacatctcttcatcggtaagtttagacagaatatcgtgaacaggtggtatattatattcatcagatatacgaagaacaatgtccaaatctatattgtttaatatattatatagatgtagcgtagctcctacaggaatatctttaactaagtcaatgatttcatcaaccgttagatctattttaaagttaatcatataggcattgatttttaaaaggtatgtagccttgactacattctcattaattaaccattccaagtcactgtgtgtaagaagattatattctatcataagcttgactacatttggtcccgataccattaaagaattcttatgatataaggaaacagcttttaggtactcatctactctacaagaattttggagagccttaacgatatcagtgacgtttattatttcaggaggaaaaaacctaacattgagaatatcggaattaatagcttccagatacagtgattttggcaatagtccgtgtaatccataatccagtaacacgagctggtgcttgctagacaccttttcaatgtttaatttttttgaaataagctttgataaagccttcctcgcaaattccggatacatgaacatgtcggcgacatgattaagtattgttttttcattattttctcaataccccaatagatgatagaatatcacccaatgcgtccatgttgtctatttccaacaggtcgctatatccaccaatagaagtttttccaaaaaagattctaggaacagttctaccaccagtaatttgttcaaaatagtcacgcaattcattttcgggtttaaattctttaatatcgacaatttcatacgctcctcttttgaaactaaacttatttagaatatccagtgcatttctacaaaaaggacatgtatacttgacaaaaattgtcactttgttattggccaacctttgttgtacaaattcctcggccattttaatatttaagtgatataaaactatctcgacttatttaactctttagtcgagatatatggacgcagatagctatatgatagccaactacagaaggcaaacgctataaaaaacataattacgacgagcatatttataaatatttttattcagcattacttgatatagtaatattaggcacagtcaaacattcaaccactctcgatacattaactctctcattttctttaacaaattctgcaatatcttcgtaaaaagattcttgaaactttttagaatatctatcgactctagatgaaatagcgttcgtcaacatactatgttttgtatacataaaggcgcccattttaacagtttctagtgacaaaatgctagcgatcctaggatcctttagaatcacatagattgacgattcgtctctcttagtaactctagtaaaataatcatacaatctagtacgcgaaataatattatccttgacttgaggagatctaaacaatctagttttgagaacatcgataagttcatcgggaatgacatacatactatctttaatagaactcttttcatccagttgaatggattcgtccttaaccaactgattaatgagatcttctattttatcattttccagatgatatgtatgtccattaaagttaaattgtgtagcgcttctttttagtctagcagccaatactttaacatcactaatatcgatatacaaaggagatgatttatctatggtattaagaattcgtttttcgacatccgtcaaaaccaattcctttttgcctgtatcatccagttttccatcctttgtaaagaaattattttctactagactattaataagactgataaggattcctccataattgcacaatccaaactttttcacaaaactagactttacaagatctacaggaatgcgtacttcaggttttttagcttgtgattttttcttttgcggacattttctagtaaccaactcatctaccatttcattgattttagcagtgaaataagctttcaatgcacgggcactgatactattgaaaacgagttgatcttcaaattccgccatttaagttcaccaaacaacttttaaatacaaatatatcaatagtagtagaataagaactataaaaaaaataataattaaccaataccaaccccaacaaccggtattattagttgatgtgactgttttctcatcacttagaacagatttaacaatttctataaagtctgtcaaatcatcttccggagaccccataaatacaccaaatatagcggcgtacaacttatccatttatacattgaatattggcttttctttatcgctatcttcatcatattcatcatcaatatcaacaagtcccagattacgagccagatcttcttctacattttcagtcattgatacacgttcactatctccagagagtccgataacgttagccaccacttctctatcaatgattagtttcttgagcgcgaaagtaatttttgtttccgttccggatctatagaagacgataggtgtgataattgccttagccaattgtctttctcttttactgagtgattctagttcaccttctatagatctgagaatggatgattctccagtcgaaacatattctaccatggatccgtttaatttgttgatgaagatggattcatccttaaatgttttctctgtaatagtttccaccgaaagactatgcaaagaatttggaatgcgttccttgtgcttaatgtttccatagacggcttctagaagttgatacaacataggactagccgcggtaacttttatttttagaaagtatccatcgcttctatcttgtttagatttatttttataaagtttagtctctccttccaacataataaaagtggaagtcatttgactagataaactatcagtaagttttatagagatagacgaacaattagcgtattgagaagcatttagtgtaacgtattcgatacattttgcattagatttactaatcgattttgcatactctataacacccgcacaagtctgtagagaatcgctagatgcagtaggtcttggtgaagtttcaactctcttcttgattaccttactcatgattaaacctaaataattgtactttgtaatataatgatatatattttcactttatctcatttgagaataaaaatgtttttgtttaaccactgcatgatgtacagatttcggaatcgcaaaccaccagtggttttattttatccttgtccaatgtgaattgaatgggagcggatgcgggtttcgtacgtagatagtacattcccgtttttagaccgagactccatccgtaaaaatgcatactcgttagtttggaataactcggatctgctatatggatattcatagattgactttgatcgatgaaggctcccctgtctgcagccatttttatgatcgtcttttgtggaatttcccaaatagttttataaactcgcttaatatcttctggaaggtttgtattctgaatggatccaccatctgccataatcctattcttgatctcatcattccataattttctctcggttaaaactctaaggagatgcggattaactacttgaaattctccagacaatactctccgagtgtaaatattactggtatacggttccaccgactcattatttcccaaaatttgagcagttgatgcagtcggcataggtgccaccaataaactatttctaagaccgtatgttctgattttatcttttagaggttcccaattccaaagatccgacggtacaacattccaaagatcatattgtagaataccgttactggcgtacgatcctacatatgtatcgtatggtccttccttctcagctagttcacaactcgcctctaatgcaccgtaataaatggtttcgaagatcttcttatttagatcttgtgcttccaggctatcaaatggataatttaagagaataaacgcgtccgctaatccttgaacaccaataccgataggtctatgtctcttattagagatttcagcttctggaataggataataattaatatctataattttattgagatttctgacaattactttgaccacatccttcagtttgagaaaatcaaatcgcccatctattacaaacatgttcaaggcaacagatgccagattacaaacggctacctcattagcatccgcatattgtattatctcagtgcaaagattactacacttgatagttcctaaattttgttgattactctttttgttacacgcatccttataaagaatgaatggagtaccagtttcaatctgagattctataatcgctttccagacgactcgagcctttattatagatttgtatctcctttctctttcgtatagtgtatacaatcgttcgaactcgtctccccaaacattgtccaatccaggacattcatccggacacatcaacgaccactctccgtcatccttcactcgtttcataaagagatcaggaatccaaagagctataaatagatctctggttctatgttcctcgtttcctgtattctttttaagatcgaggaacgccataatatcagaatgccacggttccaagtatatggccataactccaggccgtttgtttcctccctgatctatgtatctagcggtgttattataaactctcaacattggaataataccgtttgatataccattggtaccggagatatagcttccactggcacgaatattactaattgatagacctattccccctgccattttagagattaatgcgcatcgttttaacgtgtcatagataccctctatgctatcatcgatcatgttaagtagaaaacagctagacatttggtgacgactagttcccgcattaaataaggtaggagaagcgtgcgtaaaccatttttcagaaagtagattgtacgtctcaatagctgagtctatatcccattgatgaattcctactgcgacacgcattaacatgtgctgaggtctttcaacgatcttgttgtttattttcaacaagtaggatttttccaaagttttaaaaccaaaatagttgtatgaaaagtctcgttcgtaaataataaccgagttgagtttatccttatatttgttaactatatccatggtgatacttgaaataatcggagaatgtttcccatttttaggattaacatagttgaataaatcctccatcacttcactaaatagtttttttgtttccttgtgtagatttgatacggctattctggcggctagaatggcataatccggatgttgtgtagtacaagtggctgctatttcggctgccagagtgtccaattctaccgttgttactccattatatattccttgaataaccttcatagctattttaataggatctatatgatccgtgtttaagccataacataattttctaatacgagacgtgattttatcaaacatgacattttccttgtatccatttcgtttaatgacaaacatttttgttggtgtaataaaaaaattatttaacttttcattaatagggatttgacgtatgtagcgtacaaaatgatcgttcctggtatatagataaagagtcctatatatttgaaaatcgttacggctcgattaaactttaatgattgcatagtgaatatatcattaggatttaactccttgactatcatggcggcgccagaaattaccatcaaaagcattaatacagttatgccgatcgcagttaaaacggttatagcatccaccatttatatctaaaaattagatcaaagaatatgtgacaaagtcctagttgtatactgagaattgacgaaacaatgtttcttacatatttttttcttattagtaactgacttaatagtaggaactggaaagctagacttgattattctataagtatagatacccttccagataatgttctctttgataaaagttccagaaaatgtagaattttttaaaaagttatcttttgctattaccaagattgtgtttagacgcttattattaatatgagtgatgaaatccacaccgcctctagatatcgcctttatttccacattagatggtaaatccaatagtgaaactatctttttaggaatgtatggactcgcgtttagaggagtgaacgtcttgggcgtcggaaaggatgattcgtcaaacgaataaacaatttcacaaatggatgttaatgtattagtaggaaattttttgacgctagtggaattgaagattctaatggatgatgttctacctatttcatccgataacatgttaatttccgacaccaacggttttaatatttcgatgatatacggtagtctctctttcggacttatatagcttattccacaatacgagtcattatatactccaaaaaacaaaataactagtataaaatctgtatcgaatgggaaaaacgaaattatcgacataggtatagaatccggaacattgaacgtattaatacttaattctttttctgtggtaagtaccgataggttattgacattgtatggttttaaatattctataacttgagacttgatagatattagtgatgaattgaaaattatttttatcaccacgtgtgtttcaggatcatcgtcgacgcccgtcaaccaaccgaatggagtaaaataaatatcattaatatatgctctagatattagtatttttattaatcctttgattatcatcttctcgtaggcgaatgattccatgatcaagagtgatttgagaacatcctccggagtattaatgggcttagtaaacagtccatcgttgcaataataaaagttatccaagttaaaggatattatgcattcgtttaaagatatcacctcatctgacggagacaattttttggtaggttttagagactttgaagctacttgtttaacaaagttattcatcgtcgtctactattctatttaattttgtagttaatttatcacatatcacattaattgactttttggtccatttttccatacgtttatattcttttaatcctgcgttatccgtttccgttatatccagggatagatcttgcaagttaaatagaatgctcttaaataatgtcattttcttatccgctaaaaatttaaagaatgtataaacctttttcagagatttgaaactcttaggtggtgtcctagtacacaatatcataaacaaactaataaacattccacattcagattccaacagctgattaacttccacattaatacagcctattttcgctccaaatgtacattcgaaaaatctgaataaaacatcgatgtcacaatttgtattatccaatacagaatgtttgtgattcgtgttaaaaccatcggagaaggaatagaaataaaaattattatagtggtggaattcagttggaatattgcctccggagtcataaaaggatactaaacattgttttttatcataaattacacatttccaatgagacaaataacaaaatccaaacattacaaatctagaggtagaacttttaattttgtctttaagtatatacgataagatatgtttattcataaacgcgtcaaatttttcatgaatcgctaaggagtttaagaatctcatgtcaaattgtcctatataatccacttcggatccataagcaaactgagagactaagttcttaatacttcgattgctcatccaggctcctctctcaggctctattttcatcttgacgacctttggattttcaccagtatgtattcctttacgtgataaatcatcgattttcaaatccatttgtgagaagtctatcgccttagatactttttcccgtagtcgaggtttaaaaaaatacgctaacggtatactagtaggtaactcaaagacatcatatatagaatggtaacgcgtctttaactcgtcggttaactctttcttttgatcgagttcgtcgctactattgggtctgctcaggtgccccgactctactagttccaacatcataccgataggaatacaagacactttgccggcggttgtagatttatcatatttttccactacatatccgttacaatttgttaaaaatttagatacatctatattgctacataatccagctagtgaatatatatgacataataaattggtaaatcctagttctggtattttactaattactaaatctgtatatctttccatttatcatggaaaagaatttaccagatatcttcttttttccaaactgcgttaatgtattctcttacaaatattcacaagatgaattcagtaatatgagtaaaacggaacgtgatagtttctcattggccgtgtttccagttataaaacatagatggcataacgcacacgttgtaaaacataaaggaatatacaaagttagtacagaagcacgtggaaaaaaagtatctcctccatcactaggaaaacccgcacacataaacctaaccgcgaagcaatatatatacagtgaacacacaataagctttgaatgttatagttttctaaaatgtataacaaatacagaaatcaattcgttcgatgagtatatattaagaggactattagaagctggtaatagtttacagatattttccaattccgtaggtaaacgaacagatactataggtgtactagggaataagtatccatttagcaaaattccattggcctcattaactcctaaagcacaacgagagatattttcagcgtggatttctcatagacctgtagttttaactggaggaaccggagtgggtaagacgtcacaggtacccaagttattgctttggtttaattatttatttggtggattctctactctagataaaattactgactttcacgaaagaccagtcattctatctcttcctaggatagctttagttagattgcatagcaataccattttaaaatcattgggatttaaggtactagatggatctcctatttctttacggtacggatctataccggaagaattaataaacaaacaaccaaaaaaatatggaattgtattttctacccataagttatctctaacaaaactatttagttatggcactcttattatagacgaagttcatgagcatgatcaaataggagatattattatagcagtagcgagaaagcatcatacgaaaatagattctatgtttttaatgactgccacattagaggatgaccgagaacggctaaaagtatttttacctaatcccgcatttatacatattcctggagatacactgtttaaaattagcgaggtatttattcataataagataaatccatcttccagaatggcatacatagaagaagaaaagagaaatttagttactgctatacagatgtatactcctcctgatggatcatccggtatagtctttgtggcatccgttgcacagtgtcacgaatataaatcatatttagaaaaaagattaccgtatgatatgtatattattcatggtaaggtcttagatatagacgaaatattagaaaaagtgtattcatcacctaatgtatcgataattatttctactccttatttggaatccagcgttactatacgcaatgttacacacatttatgatatgggtagagtttttgtccccgctccttttggaggatcgcaacaatttatttctaaatctatgagagatcaacgaaaaggaagagtaggaagagttaatcctggtacatacgtctatttctatgatctgtcttatatgaagtctatacagcgaatagattcagaatttctacataattatatattgtacgctaataagtttaatctaacactccccgaagatttgtttataatccctacaaatttggatattctatggcgtacaaaggaatatatagactcgttcgatattagtacagaaacatggaataaattattatccaattattatatgaagatgatagagtatgctaaactttatgtactaagtcctattctcgctgaggagttggataactttgagaggacgggagaattaactagtattgtacgagaagccattttatctctaaatttacgaattaagattttaaattttaaacataaagatgatgatacgtatatacacttttgtaaaatattattcggtgtctataacggaacaaacgctactatatattatcatagacctctaacgggatatatgaatatgatttcagatactatatttgttcctgtagataataactaaaaatcaaactctaatgaccacatctttttttagagatgaaaaattttccacatctccttttgtagacacgactaaacattttgcagaaaaaagtttattagtgtttagataatcgtatacttcatcagtgtagatagtaaatgtgaacagataaaaggtattcttgctcaatagattggtaaattccatagaatatattaatcctttcttcttgagatcccacatcatttcaaccagagacgttttatccaatgatttacctcgtactataccacatacaaaactagattttgcagtgacgtcgtacctggtattcctaccaaacaaaattttacttttagttcttttagaaaattctaaggtagaatctctatttgccaatatgtcatctatggaattaccactagcaaaaaatgatagaaatatatattgatacatcgcagctggttttgatctactatactttaaaaacgaatcagattccataattgcctgtatatcatcagctgaaaaactatgttttacacgtattccttcggcatttctttttaatgatatatcttgtttagacaatgataaagttatcatgtccatgagagacgcgtctccgtatcgtataaatatttcattagatgttagacgcttcattaggggtatacttctataaggtttcttaatcagtccatcattggttgcgtcaagaactactatcggatgttgttgggtatctctagtgttacacatggccttactaaagtttgggtaaataactatgatatctctattaattatagatgcatatatttcattcgtcaaggatattagtatcgacttgctatcgtcattaatacgtgtaatgtaatcatataaatcatgcgatagccaaggaaaatttaaatagatgttcatcatataatcgtcgctataattcatattaatacgttgacattgactaatttgtaatatagcctcgccacgaagaaagctctcgtattcagtttcatcgataaaggataccgttaaatataactggttgccgatagtctcatagtctattaagtggtaagtttcgtacaaatacagaatccctaaaatattatctaatgttggattaatctttaccataactgtataaaatggagacggagtcataactattttaccgtttgtacttactggaatagatgaaggaataatctccggacatgctggtaaagacccaaatgtctgtttgaagaaatccaatgttccaggtcctaatctcttaacaaaaattacgatattcgatcccgatatcctttgcattctatttaccagcatatcacgaactatattaagattatctatcatgtctattctcccaccgttatataaatcgcctccgctaagaaacgttagtatatccatacaatggaatacttcatttctaaaatagtattcgttttctaattctttaatgtgaaatcgtatactagaaagggaaaaattatctttgagttttccgttagaaaagaaccacgaaactaatgttctgattgcgtccgattccgttgctgaattaatggatttacaccaaaaactcatataacttctagatgtagaagcattcgctaaaaaattagtagaatcaaaggatataagtagatgttccaacaagtgagcaattcccaagatttcatctatatcattctcgaatccgaaattagaaattcccaagtagatatcctttttcatccgatcgttgatgaaaatacgaactttattcggtaagacaatcatttactaaggagtaaaataggaagtaatgttcgtatgtcgttatcatcgtataaattaaaggtgtgttttttaccattaagtgacattataattttaccaatattggaattataatataggtgtatttgcgcactcgcgacggttgatgcatcggtaaatatagctgtatctaatgttctagtcggtatttcatcatttcgctgtctaataatagcgttttctctatctgtttccattacagctgcctgaagtttattggtcggataatatgtaaaataataagaaatacatacgaataacaaaaataaaataagatataataaagatgccatttagagatctaattttgtttaacttgtccaaattcctacttacagaagatgaggaatcgttggagatagtgtcttccttatgtagaggatttgaaatatcttataatgacttgataacttactttccagataggaaataccataaatatatttataaagtatttgaacatgtagatttatcggaggaattaagtatggaattccatgatacaactctgagagatttagtctatcttagattgtacaagtattccaagtgtatacggccgtgttataaattaggagataatctaaaaggcatagttgttataaaggacaggaatatttatattagggaagcaaatgatgacttgatagaatatctcctcaaggaatacactcctcagatttatacatattctaatgagcgcgtccccataactggttcaaaattaattctttgtggattttctcaagttacatttatggcgtatacaacgtcgcatataacaacaaataaaaaggtagatgttctcgtttccaaaaaatgtatagatgaactagtcgatccaataaattatcaaatacttcaaaatttatttgataaaggaagcggaacaataaacaaaatactcaggaagatattttattcggtaacaggtggccaaactccataggtagctttttctatttcggattttagaatttccaaattcaccagcgatttatcggttttggtgaaatccaaggatttattaatgtccacaaatgccatttgttttgtctgtggattgtatttgaaaatggaaacgatgtagttagatagatgcgctgcaaagtttcctattagggttccgcgctttacgtcacccagcatacttgaatcaccatcctttaaaaaaaatgataagatatcaacatggagtatatcatactcggattttaattcttctactgcatcactgacattttcacaaatactacaatacggtttaccgaaaataatcagtacgttcttcatttatgggtatcaaaaacttaaaatcgttactgctggaaaataaatcactgacgatattagatgataatttatacaaagtatacaatggaatatttgtggatacaatgagtatttatatagccgtcgccaattgtgtcagaaacttagaagagttaactacggtattcataaaatacgtaaacggatgggtaaaaaagggagggcatgtaaccctttttatcgatagaggaagtataaaaattaaacaagacgttagagacaagagacgtaaatattctaaattaaccaaggacagaaaaatgttagaattagaaaagtgtacatccgaaatacaaaatgttaccggatttatggaagaagaaataaaggcagaaatgcaattaaaaatcgataaactcacatttcaaatatatttatctgattctgataacataaaaatatcattgaatgagatactaacacatttcaacaataatgagaatgttacattattttattgtgatgaacgagacgcagaattcgttatgtgtctcgaggctaaaacacatttctctaccacaggagaatggccgttgataataagtaccgatcaggatactatgctatttgcatctgctgataatcatcctaagatgataaaaaacttaactcaactgtttaaatttgttccctcggcagaggataactatttagcaaaattaacggcgttagtgaatggatgtgatttctttcctggactctatggggcatctataacacccaccaacttaaacaaaatacaattgtttagtgattttacaatcgataatatagtcactagtttggcaattaaaaattattatagaaagactaactctaccgtagacgtgcgtaatattgttacgtttataaacgattacgctaatttagacgatgtctactcgtatattcctccttgtcaatgcactgttcaagaatttatattttccgcattagatgaaaaatggaatgaatttaaatcatcttatttagaaagcgtgccgttaccctgccaattaatgtacgcgttagaaccacgcaaggagattgatgtttcagaagttaaaactttatcatcttatatagatttcgaaaatactaaatcagatatcgatgttataaaatctatatcctcgatcttcggatattctaacgaaaactgtaacacgatagtattcggcatctataaggataatttactactgagtataaataattcattttactttaacgatagtctgttaataaccaatactaaaagtgataatataataaatataggttactagattaaaaatggtgttccaactcgtgtgctctacatgcggtaaagatatttctcacgaacgatataaattgattatacgaaaaaaatcattaaaggatgtactcgtcagtgtaaagaacgaatgttgtaggttaaaattatctacacaaatagaacctcaacgtaacttaacagtgcaacctctattggatataaactaatatggatccggttaattttatcaagacatatgcgcctagaggttctattatttttattaattataccatgtcattaacaagtcatttgaatccatcgatagaaaaacatgtgggtatttattatggtacgttattatcggaacacttggtagttgaatctacctatagaaaaggagttcgaatagtcccattggatagtttttttgaaggatatcttagtgcaaaagtatacatgttagagaatattcaagttatgaaaatagcagctgatacgtcattaactttattgggtattccgtatggatttggtcataatagaatgtattgttttaaattggtagctgactgttataaaaatgccggtattgatacatcgtctaaacgaatattgggcaaagatatttttctgagccaaaacttcacagacgataatagatggataaagatatatgattctaataatttaacattttggcaaattgattaccttaaagggtgagttaatatgcataactactcctccgttgttttttccctcgttctttttcttaacgttgtttgccatcactctcataatgtaaagatattctaaaatggtaaacttttgcatatcggacgcagaaattggtataaatgttgtaattgtattatttcccgtcaatggactagtcacagctccatcagttttatatcctttagagtatttctcactcgtgtctaacattctagagcattccatgatctgtttatcgttgatattggccggaaagatagattttttattttttattatattactattggcaattgtagatataacttctggtaaatatttttctaccttttcaatctcttctattttcaagccggctatatattctgctatattgttgctagtatcaataccttttctggctaagaagtcatatgtggtattcactatatcagttttaactggtagttccattagcctttccacttctgcagaataatcagaaattggttctttaccagaaaatccagctactataataggctcaccgatgatcattggcaaaatcctatattgtaccagattaatgagagcatatttcatttccaataattctgctagttcttgagacattgatttatttgatgaatctagttggttctctagatactctaccatttctgccgcatacaataacttgttagataaaatcagggttatcaaagtgtttagcgtggctagaatagtgggcttgcatgtattaaagaatgcggtagtatgagtaaaccgttttaacgaattatatagtctccagaaatctgtggcgttacatacatgagccgaatgacatcgaagattgtccaatatttttaatagctgctctttgtccattatttctatatttgactcgcaacaattgtagataccattaatcaccgattcctttttcgatgccggacaatagcacaattgtttagctttggactctatgtattcagaattaatagatatatctctcaatacagattgcactatacattttgaaactatgtcaaaaattgtagaacgacgctgttctgcagccatttaactttaaataatttacaaaaatttaaaatgagcatccgtataaaaatcgataaactgcgccaaattgtggcatatttttcagagttcagtgaagaagtgtctataaatgtagactcgacggatgagttaatgtatatttttgccgccttgggcggatctgtaaacatttgggcaattatacctctaagtgcatcagtgttttaccgaggagccgaaaatattgtgtttaatcttcctgtgtccaaggtaaaatcgtgtttgtgtagttttcacaatgatgccatcatagatatagaacctgatctggaaaataatctagtaaaactttctagttatcatgtagtaagtgtcgattgtaacaaggaactgatgcctattaggacagatactactatttgtctaagtatagatcaaaagaaatcttacgtgtttaattttcacaagtatgaagaaaaatgttgtggtagaaccgtcattcatctagaatggttgttgggctttatcaagtgtattagtcagcatcagcatctggctattatgtttaaagatgacaatattattatgaagactcctggtaatactgatgcgttttccagggaatattctatgactgaatgttctcaagaactacaaaagttttctttcaaaatagctatctcgtctctcaacaaactacgaggattcaaaaagagagtcaatgtttttgaaactagaatcgtaatggataatgacgataacattttaggaatgttgttttcggatagagttcaatcctttaagatcaacatctttatggcgtttttagattaatactttcaatgagataaatatgggtggcggagtaagtgttgagctccctaaacgggatccgcctccgggagtacccactgatgagatgttattaaacgtggataaaatgcatgacgtgatagctcccgctaagcttttagaatatgtgcatataggaccactagcaaaagataaagaggataaagtaaagaaaagatatccagagtttagattagtcaacacaggacccggtggtctttcggcattgttaagacaatcgtataatggaaccgcacccaattgctgtcgcacttttaatcgtactcattattggaagaaggatggaaagatatcagataagtatgaagagggtgcagtattagaatcgtgttggccagacgttcacgacactggaaaatgcgatgttgatttattcgactggtgtcagggggatacgttcgatagaaacatatgccatcagtggatcggttcagcctttaataggagtaatagaactgtagagggtcaacaatcgttaataaatctgtataataagatgcaaacattatgtagtaaagatgctagtgtaccaatatgcgaatcatttttgcattatttacgcgcacacaatacagaagatagcaaagagatgatcgattatattctaagacaacagtctgcggactttaaacagaaatatatgagatgtagttatcccactagagataagttagaagagtcattaaaatatgcggaacctcgagaatgttgggatccagagtgttcgaatgccaatgttaatttcttactaacacgtaattataataatttaggactttgcaatattgtacgatgtaataccagcgtgaacaacttacagatggataaaacttcctcattaagattgtcatgtggattaagcaatagtgatagattttctactgttcccgtcaatagagcaaaagtagttcaacataatattaaacactcgttcgacctaaaattgcatttgatcagtttattatctctcttggtaatatggatactaattgtagctatttaaatgggtgccgcggcaagcatacagacgacggtgaatacactcagcgaacgtatctcgtctaaattagaacaagaagcgaacgctagtgctcaaacaaaatgtgatatagaaatcggaaatttttatatccgacaaaaccatggatgtaacctcactgttaaaaatatgtgctctgcggacgcggatgctcagttggatgctgtgttatcagccgctacagaaacatatagtggattaacaccggaacaaaaagcatacgtgccagctatgtttactgctgcgttaaacattcagacgagtgtaaacactgttgttagagattttgaaaattatgtgaaacagacttgtaattctagcgcggtcgtcgataacaaattaaagatacaaaacgtaatcatagatgaatgttacggagccccaggatctccaacaaatttggaatttattaatacaggatctagcaaaggaaattgtgccattaaagcgttgatgcaattgacgactaaggccactactcaaatagcacctagacaagttgctggtacaggagttcagttttatatgattgttatcggtgttataatattggcagcgttgtttatgtactatgccaagcgtatgttgttcacatccaccaatgataaaatcaaacttattttagccaataaggaaaacgtccattggactacttacatggacacattctttagaacttctccgatggttattgctaccacggatatgcaaaactgaaaatatattgataatattttaatagattaacatggaagttatcgctgatcgtctagacgatatagtgaaacaaaatatagcggatgaaaaatttgtagattttgttatacacggtctagagcatcaatgtcctgctatacttcgaccattaattaggttgtttattgatatactattatttgttatagtaatttatatttttacggtacgtctagtaagtagaaattatcaaatgttgttggtggtgctagtcatcacattaactattttttattactttatactataatagtactagactgacttctaacaaacatctcacctgccataaataaatgcttgatattaaagtcttctatttctaacactattccatctgtggaaaataatactctgacattatcgctaattgacacatcggtgagtgatatgcctataaagtaataatcttctttgggcacatataccagtgtaccaggttctaacaacctatttactggtgctcctgtagcatactttttctttaccttgagaatatccatcgtttgcttggtcaatagcgatatgtgattttttatcaaccactcaaaaaagtaattggagtgttcatatcctctacgggctattgtctcatggccgtgtatgaaatttaagtaacacgactgtggtagatttgttctatagagccgattgccgcaaatagatagaactaccaatatgtctgtacaaatgttaaacattaattgattaacagaaaaaacaatgttcgttctgggaatagaaaccagatcaaaacaaaattcgttagaatatatgccacgtttatacatggaatataaaataactacagtttgaaaaataacagtatcatttaaacatttaacttgcggggttaatctcacaactttactgtttttgaactgttcaaaatatagcatcgatccgtgagaaatacgtttagccgcctttaatagaggaaatcccaccgcctttctggatctcaccaacgacgatagttctgaccagcaactcatttcttcatcatccacctgttttaacatataataggcaggagatagatatccgtcattgcaatattccttctcgtaggcacacaatctaatattgataaaatctccattctcttctctgcatttattatcttgtctcggtggctgattaggctgtggtcttggtttaggccttggtctatcgttgttgaatctattttggtcattaaatctttcatttcttcctggtatatttttatcacctcgtttggttggatttttgtctatattatcgtttgtaacatcggtacgggtattcatttatcacaaaaaaaacttctctaaatgagtctactgctagaaaacctcatcgaagaagataccatattttttgcaggaagtatatctgagtatgatgatttacaaatggttattgccggcgcaaaatccaaatttccaagatctatgctttctatttttaatatagtacctagaacgatgtcaaaatatgagttggagttgattcataacgaaaatatcacaggagcaatgtttaccacaatgtataatataagaaacaatttgggtctaggagatgataaactaactattgaagccattgaaaactatttcttggatcctaacaatgaagttatgcctcttattattaataatacggatatgactgccgtcattcctaaaaaaagtggtaggagaaagaataagaacatggttatcttccgtcaaggatcatcacctatcttgtgcattttcgaaactcgtaaaaagattaatatttataaagaaaatatggaatccgcgtcgactgagtatacacctatcggagacaacaaggctttgatatctaaatatgcgggaattaatgtcctgaatgtgtattctccttccacatccataagattgaatgccatttacggattcaccaataaaaataaactagagaaacttagtactaataaggaactagaatcgtatagttctagccctcttcaagaacccattaggttaaatgattttctgggactattggaatgtgttaaaaagaatattcctctaacagatattccgacaaaggattgattactataaatggagaatgttcctaatgtatactttaatcctgtgtttatagagcccacgtttaaacattctttattaagtgtttataaacacagattaatagttttatttgaagtattcgttgtattcattctaatatatgtattttttagatctgaattaaatatgttcttcatgcctaaacgaaaaatacccgatcctattgatagattacgacgtgctaatctagcgtgtgaagacgataaattaatgatctatggattaccatggatgacaactcaaacatctgcgttatcaataaatagtaaaccgatagtgtataaagattgtgcaaagcttttgcgatcaataaatggatcacaaccagtatctcttaacgatgttcttcgcagatgatgattcattttttaagtatttggctagtcaagatgatgaatcttcattatctgatatattgcaaatcactcaatatctagactttctgttattattattgatccaatcaaaaaataaattagaagctgtgggtcattgttatgaatctctttcagaggaatacagacaattgacaaaattcacagactttcaagattttaaaaaactgtttaacaaggtccctattgttacagatggaagggtcaaacttaataaaggatatttgttcgactttgtgattagtttgatgcgattcaaaaaagaatcctctctagctaccaccgcaatagatcctgttagatacatagatcctcgtcgtgatatcgcattttctaacgtgatggatatattaaagtcgaataaagtgaacaataattaattctttattgtcatcatgaacggcggacatattcagttgataatcggccccatgttttcaggtaaaagtacagaattaattagacgagttagacgttatcaaatagctcaatataaatgcgtgactataaaatattctaacgataatagatacggaacgggactatggacgcatgataagaataattttgaagcattggaagcaactaaactatgtgatgtcttggaatcaattacagatttctccgtgataggtatcgatgaaggacagttctttccagacattgtttaattctgtgagcgtatggcaaacggtaccgagctcggtttggaattagtgaaagcttaaaaattgaaattttattttttttttttggaatataaataagctcgaagtcgaccaccatgttcttggctgttttgtattgccttctgtggagtttccagatctctgatggccattttcctcgagcctgtgcctcctctaagaacttgttggcaaaagaatgctgcccaccatggatgggtgatgggagtccctgcggccagctttcaggcagaggttcctgccaggatatccttctgtccagtgcaccatctggacctcagttccccttcaaaggggtggatgaccgtgagtcctggccctctgtgttttataataggacctgccagtgctcaggcaacttcatgggtttcaactgcggaaactgtaagtttggatttgggggcccaaattgtacagagaagcgagtcttgattagaagaaacatttttgatttgagtgtctccgaaaagaataagttcttttcttacctcactttagcaaaacatactatcagctcagtctatgtcatccccacaggcacctatggccaaatgaacaatgggtcaacacccatgtttaatgatatcaacatctacgacctctttgtatggatgcattactatgtgtcaagggacacactgcttgggggctctgaaatatggagggacattgattttgcccatgaagcaccagggtttctgccttggcacagacttttcttgttattgtgggaacaagaaattcgagaactaactggggatgagaacttcactgttccatactgggattggagagatgcagaaaactgtgacatttgcacagatgagtacttgggaggtcgtcaccctgaaaatcctaacttactcagcccagcatccttcttctcctcctggcagatcatttgtagcagatcagaagagtataatagccatcaggttttatgcgatggaacacctgagggaccactattacgtaatcctggaaaccatgacaaagccaaaacccccaggctcccatcttcagcagatgtggaattttgtctgagtttgacccagtatgaatctggatcaatggatagaactgccaatttcagctttagaaacacactggaaggatttgccagtccactcacagggatagcagatccttctcaaagtagcatgcacaatgccttacatatctttatgaatggaacaatgtcccaagtacagggatcggccaacgatcccatttttcttcttcaccatgcttttgtggacagtatttttgaacaatggctgcgaaggcaccgccctcttttggaagtttacccagaagccaatgcacctatcggccataacagagactcttacatggttcctttcataccgctctatagaaatggtgatttcttcataacatccaaggatctgggatatgactacagctacctccaagagtcagatccaggcttttacagaaattatattgagccttacttggaacaagccagtcgtatctggccatggcttcttggggcagcactggtgggagctgttattgctgcagctctctctgggcttagcagtaggctatgccttcagaagaagaagaagaagaagcaaccccaggaggaaaggcagccactcctcatggacaaagacgactaccacagcttgctgtatcagagccatctgtgattaattaatttttatcgatctaattcaacaatgtctggagagctcggatccttctgtgagcgtatggcaaacgaaggaaaaatagttatagtagccgcactcgatgggacatttcaacgtaaaccgtttaataatattttgaatcttattccattatctgaaatggtggtaaaactaactgctgtgtgtatgaaatgctttaaggaggcttccttttctaaacgattgggtgaggaaaccgagatagagataataggaggtaatgatatgtatcaatcggtgtgtagaaagtgttacgtcggctcataatattatattttttatctaaaaaactaaaaataaacattgattaaattttaatataatacttaaaaatggatgttgtgtcgttagataaaccgtttatgtattttgaggaaattgataatgagttagattacgaaccagaaagtgcaaatgaggtcgcaaaaaaactgccgtatcaaggacagttaaaactattactaggagaattattttttcttagtaagttacagcgacacggtatattagatggtgccaccgtagtgtatataggatcggctcctggtacacatatacgttatttgagagatcatttctataatttaggagtgatcatcaaatggatgctaattgacggccgccatcatgatcctattttaaatggattgcgtgatgtaactctagtgactcggttcgttgatgaggaatatctacgatccatcaaaaaacaactgcatccttctaagattattttaatttctgatgtgagatccaaacgaggaggaaatgaacctagtacggcggatttactaagtaattacgctctacaaaatgtcatgattagtattttaaaccccgtggcgtctagtcttaaatggagatgcccgtttccagatcaatggatcaaggacttttatatcccacacggtaataaaatgttacaaccttttgctccttcatattcagctgaaatgagattattaagtatttataccggtgagaacatgagactgactcgagttaccaaattagacgctgtaaattatgaaaaaaagatgtactaccttaataagatcgtccgtaacaaagtagttgttaactttgattatcctaatcaggaatatgactattttcacatgtactttatgctgaggaccgtgtactgcaataaaacatttcctactactaaagcaaaggtactatttctacaacaatctatatttcgtttcttaaatattccaacaacatcaactgaaaaagttagtcatgaaccaatacaacgtaaaatatctagcaaaaattctatgtctaaaaacagaaatagcaagagatccgtacgcggtaataaatagaaacgtactactgagatatactaccgatatagagtataatgatttagttactttaataaccgttagacataaaattgattctatgaaaactgtgtttcaggtatttaacgaatcatccataaattatactccggttgatgatgattatggagaaccaatcattataacatcgtatcttcaaaaaggtcataacaagtttcctgtaaattttctatacatagatgtggtaatatctgacttatttcctagctttgttagactagatactacagaaactaatatagttaatagtgtactacaaacaggcgatggtaaaaagactcttcgtcttcccaaaatgttagagacggaaatagttgtcaagattctctatcgccctaatataccattaaaaattgttagatttttccgcaataacatggtaactggagtagagatagccgatagatctgttatttcagtcgctgattaatcaattagtagagatgagataagaacattataataatcaataatatatcttatatcttatatcttatatcttatatcttgtttagaaaaatgctaatattaaaatagctaacgctagtaatccaatcggaagccatttgatatctataatagggtatctaatttcctgatttaaatagcggacagctatattctcggtagctactcgtttggaatcacaaacattatttacatctaatttactatctgtaatggaaacgtttcccaatgaaatggtacaatccgatacattgcattttgttatatttttttttaaagaggctggtaacaacgcatcgcttcgtttacatggctcgtaccaacaataatagggtaatcttgtatctattcctatccgtactatgcttttatcaggataaatacatttacatcgtatatcgtctttgttagcatcacagaatgcataaatttgttcgtccgtcatgataaaaatttaaagtgtaaatataactattatttttatagttgtaataaaaagggaaatttaattgtatactttcggttctttaaaagaaactgacttgataaaaatggctgtaatctctaaggttacgtatagtctatatgatcaaaaagagattaatgctacagatattatcattagtcatgttaaaaatgacgacgatatcggtaccgttaaagatggtagactaggtgctatggatggggcattatgtaagacttgtgggaaaacggaattggaatgtttcggtcactggggtaaagtaagtatttataaaactcatatagttaagcctgaatttatttcagaaattattcgtttactgaatcatatatgtattcactgcggattattgcgttcacgagaaccgtattccgacgatattaacctaaaagagttatcgggacacgctcttaggagattaaaggataaaatattatccaagaaaaagtcatgttggaacagtgaatgtatgcaaccgtatcaaaaaattactttttcaaagaaaaaggtttgtttcgtcaacaagttggatgatattaacgttcctaattctctcatctatcaaaagttaatttctattcatgaaaagttttggccattattagaaattcatcaatatccagctaacttattttatacagactactttcccatccctccgttgattattagaccggctattagtttttggatagatagtatacccaaagagaccaatgaattaacttacttattaggtatgatcgttaagaattgtaacttgaatgctgatgaacaggttatccagaaggcggtaatagaatacgatgatattaaaattatttctaataacactaccagtatcaatttatcatatattacatccggcaaaaataatatgattagaagttatatcgtcgcccgacgaaaagatcagaccgctagatctgtaattggtcccagtacatctatcaccgttaatgaggtaggaatgcccgcatatattagaaatacacttacagaaaagatatttgttaatgcctttacagtggataaagttaaacaactattagcgtcaaaccaagttaaattttactttaataaacgattaaaccaattaacaagaatacgccaaggaaagtttattaaaaataaaatacatttattgcctggtgattgggtagaagtagctgttcaagaatatacaagtattatttttggaagacagccgtctctacatagatacaacgtcatcgcttcatctatcagagctaccgaaggagatactatcaaaatatctcccggaattgccaactctcaaaatgctgatttcgacggggatgaggaatggatgatattagaacaaaatcctaaagctgtaattgaacaaagtattcttatgtatccgacgacgttactcaaacacgatattcatggagcccccgtttatggatctattcaagatgaaatcgtagcagcgtattcattgtttaggatacaagatctttgtttagatgaagtattgaacatcttggggaaatatggaagagagttcgatcctaaaggtaaatgtaaattcagcggtaaagatatctatacttacttgataggtgaaaagattaattatccgggtctcttaaaggatggtgaaattattgcaaacgacgtagatagtaattttgttgtggctatgaggcatctgtcattggctggactcttatccgatcataagtcgaacgtggaaggtatcaactttattatcaagtcatcttatgtttttaagagatatctatctatttacggttttggggtgacattcaaagatctgagaccaaattcgacgttcactaataaattggaggccatcaacgtagaaaaaatagaacttatcaaagaagcatacgccaaatatctcaacgatgtaagagacgggaaaatagttccattatctaaagctttagaggcggactatgtggaatccatgttatccaacttgacaaatcttaatatccgagagatagaagaacatatgagacaaacgctgatagatgatccagataataacctcctgaaaatggccaaagcgggttataaagtaaatcccacagaactaatgtatattctaggtacgtatggacaacaaaggattgatggtgaaccagcagagactcgagtattgggtagagttttaccttactatcttccagactctaaggatccagaaggaagaggttatattcttaattctttaacaaaaggattaacgggttctcaatattacttttcgatgctggttgcaagatctcaatctactgatatcgtctgtgaaacatcacgtaccggaacactggctagaaaaatcattaaaaagatggaggatatggtggtcgacggatacggacaagtagttataggtaatacgctcatcaagtacgccgccaattataccaaaattctaggctcagtatgtaaacctgtagatcttatctatccagatgagtccatgacttggtatttggaaattagtgctctgtggaataaaataaaacagggattcgtttactctcagaaacagaaacttgcaaagaagacattggcgccgtttaatttcctagtattcgtcaaacccaccactgaggataatgctattaaggttaaggatctgtacgatatgattcataacgtcattgatgatgtgagagagaaatacttctttacggtatctaatatagattttatggagtatatattcttgacgcatcttaatccttctagaattagaattacaaaagaaacggctatcactatctttgaaaagttctatgaaaaactcaattatactctaggtggtggaactcctattggaattatttctgcacaggtattgtctgagaagtttacacaacaagccctgtccagttttcacactactgaaaaaagtggtgccgtcaaacaaaaacttggtttcaacgagtttaataacttgactaatttgagtaagaataagaccgaaattatcactctggtatccgatgatatctctaaacttcaatctgttaagattaatttcgaatttgtatgtttgggagaattaaatccagacatcactcttcgaaaagaaacagataggtatgtagtagatataatagtcaatagattatacatcaagagagcagaaataaccgaattagtcgtcgaatatatgattgaacgatttatctcctttagcgtcattgtaaaggaatggggtatggaaacattcattgaggatgaggataatattagatttactgtctacctaaatttcgttgaaccggaagaattgaatcttagtaagtttatgatggttcttccgggtgccgccaacaagggaaagattagtaaattcaagattcctatctctgactatacgggttatgacgacttcaatcaaacaaaaaagctcaataagatgactgtagaactcatgaatctaaaagaattgggttctttcgatttggaaaacgtcaacgtgtatcctggagtatggaatacatacgatatcttcggtatcgaggccgctcgtgaatacttgtgcgaagccatgttaaacacctatggagaagggttcgattatctgtatcagccttgtgatcttctcgctagtttactatgtgctagttacgaaccagaatcagtgaataaattcaagttcggcgcagctagtactcttaagagagctacgttcggagacaataaagcattgttaaacgcggctcttcataaaaagtcagaacctattaacgataatagtagctgccacttttttagcaaggtccctaatataggaactggatattacaaatactttatcgacttgggtcttctcatgagaatggaaaggaaactatctgataagatatcttctcaaaagatcaaggaaatggaagaaacagaagacttttaattcttatcaataacatatttttctatgatctgtcttttaaacgatggattttccacaaatgcgcctctcaagtccctcatagaatgatacacgtataaaaaatatagcataggcaatgactccttatttttagacattagatatgccaaaatcatagccccgcttctatttactcccgcagcacaatgaaccaacacgggctcgtttcgttgatcacatttagataaaaaggcggttacgtcgtcaaaatatttactaatatcggtagttgtatcatctaccaacggtatatgaataatattaatattagagttaggtaatgtatatttatccatcgtcaaatttaaaacatatttgaacttaacttcagatgatggtgcatccatagcatttttataatttcccaaatacacattattggttacccttgtcattatagtgggagatttggctttgtgcatatctccagttgaacgtagtagtaagtatttatacaaacttttcttatccatttataacgtacaaatggataaaactactttatcggtaaacgcgtgtaatttagaatacgttagagaaaaggctatagtaggcgtacaagcagccaaaacatcaacacttatattctttgttattatattggcaattagtgcgctattactctggtttcagacgtctgataatccagtctttaatgaattaacgagatatatgcgaattaaaaatacggttaacgattggaaatcattaacggatagcaaaacaaaattagaaagtgatagaggtagacttctagccgctggtaaggatgatatattcgacttcaaatgtgtggatttcggcgcctattttatagctatgcgattggataagaaaacatatctgccgcaagctattaggcgaggtactggagacgcgtggatggttaaaaaggcggcaaaggtcgatccatctgctcaacaattttgtcagtatttgataaaacacaagtctaataatgttattacttgtggtaatgagatgttaaatgaattaggttatagcggttattttatgtcaccgcattggtgttccgattttagtaatatggaatagtgttagataaatgcggtaacgaatgttcctgtaaggaaccataacagcttagatttaacgttaaagatgagcataaacataataaacaaaattacaatcaaacttataacattaatatcaaacaatccaaaaaatgaaatcagtggagtagtaaacgcgtacataactcctggataacgtttagcagctgccgttcctattctagaccaaaaatttggtttcatgttttcgaaacggtattctgcaacaagtcggggatcgtgttctacatatttggcggcattatccagtatctgcctattgatcttcatttcgttttcgattctggctatttcaaaataaaatcccgatgatagacctccagactttataatttcatctacgatgttcagcgccgtagtaactctaataatataggctgataagctaacatcataccctcctgtatatgtgaatatggcatgatttttgtccattacaagctcggttttaactttattgcctgtaataatttctctcatctgtaggatatctatttttttgtcatgcattgccttcaagacgggacgaagaaacgtaatatcctcaataacgttatcgttttctacaataactacatattctacctttttattttctaactcggtaaaaaaattagaatcccatagggctaaatgtctagcgatatttcttttcgtttcctctgtacacatagtgttacaaaaccctgaaaagaagtgagtatacttgtcatcatttctaatgtttcctccagtccactgtataaacgcataatccttgtaatgatctggatcatccttgactaccacaacatttcttttttctggcataacttcgttgtcctttacatcatcgaacttctgatcattaatatgctcatgaacattaggaaatgtttctgatggaggtctatcaataactggcacaacaataacaggagttttcaccgccgccatttagttattgaaattaatcatatacaactctttaatacgagttatattttcgtctatccattgtttcacatttacatatttcgacaaaaagatataaaatgcgtattccaatgcttctctgtttaatgaattactaaaatatacaaacacgtcactgtctggcaataaatgatatcttagaatattgtaacaatttattttgtattgcacatgttcgtgatctatgagttcttcttcgaatggcataggatctccgaatctgaaaacgtataaataggagttagaataataatatttgagagtattggtaatatataaactctttagcggtataattagtttttttctctcaatttctatttttagatgtgatggaaaaatgactaattttgtagcattagtatcatgaactctaatcaaaatcttaatatcttcgtcacacgttagctctttgaagtttttaagagatgcatcagttggttctacagatggagtaggtgcaacaattttttgttctacacatgtatgtactggagccattgttttaactataatggtgcttgtatcgaaaaactttaatgcagatagcggaagctcttcgccgcgactttctacgtcgtaattgggttctaacgccgatctctgaatggatactagttttctaagttctaatgtgattctctgaaaatgtaaatccaattcctccggcattatagatgtgtatacatcggtaaataaaactatagtatccaacgatcccttctcgcaaattctagtcttaaccaaaaaatcgtatataaccacggagatggcgtatttaagagtggattcttctaccgttttgttcttggatgtcatataggaaactataaagtccgcactactgttaagaatgattactaacgcaactatatagttcaaattaagcattttggaaacataaaataactctgtagacgatacttgactttcgaataagtttgcagacaaacgaagaaagaacagacctctcttaatttcagaagaaaactttttttcgtattcctgacgtctagagtttatatcaataagaaagttaagaattagtcggttaatgttgtatttcattacccaagtttgagatttcataatattatcaaaagacatgataatattaaagataaagcgctgactatgaacgaaatagctatatggttcgctcaagaatatagtcttgttaaacgtggaaacgataactgtatttttaatcacgtcagcggcatctaaattaaatataggtatatttattccacacactctacaatatgccacaccatcttcataataaataaattcgttagcaaaattattaattttagtgaaatagttagcgtcaactttcatagcttccttcaatctaatttgatgctcacacggtgcgaattccactctaacatcccttttccatgcctcaggttcatcgatctctataatatctagttttttgcgtttcacaaacacaggctcgtctctcgcgatgagatctgtatagtaactatgtaaatgataactagatagaaagatgtagctatatagatgacgatcctttaagagaggtataataactttaccccaatcagatagactgttgttatggtcttcggaaaaagaatttttataaatttttccagtattttccaaatatacgtacttaacatctaaaaaatccttaatgataataggaatggataatccgtctattttataaagaaatacatatcgcacattatacttttttttggaaatgggaataccgatgtgtctacataaatatgcaaagtctaaatattttttagagaatcttagttggtccaaattcttttccaagtacggtaatagatttttcatattgaacggtatcttcttaatctctggttctagttccgcattaaatgatgaaactaagtcactatttttataactaacgattacatcacctctaacatcatcatttaccagaatactgatcttcttttgtcgtaaatacatgtctaatgtgttaaaaaaaagatcatacaagttatacgtcatttcatctgtggtattcttgtcattgaaggataaactcgtactaatctcttctttaacagcctgttcaaatttatatcctatatacgaaaaaatagcaaccagtgtttgatcatccgcgtcaatattctgttctatcgtagtgtataacaatcgtatatcttcttctgtgatagtcgatacgttataaaggttgataacgaaaatatttttatttcgtgaaataaagtcatcgtaggattttggacttatattcgcgtctagtagatatgcttttatttttggaatgatctcaattagaatagtctctttagagtccatttaaagttacaaacaactaggaaattggtttatgatgtataatttttttagtttttatagattctttattctatacttaaaaaatgaaaataaatacaaaggttcttgagggttgtgttaaattgaaagcgagaaataatcataaattatttcattatcgcgatatccgttaagtttgtatcgtaatggcgtggtcaattacgaataaagcggatactagtagcttcacaaagatggctgaaatcagagctcatctaaaaaatagcgctgaaaataaagataaaaacgaggatattttcccggaagatgtaataattccatctactaagcccaaaaccaaacgagccactactcctcgtaaaccagcggctactaaaagatcaaccaaaaaggaggaagtggaagaagaagtagttatagaggaatatcatcaaacaactgaaaaaaattctccatctcctggagtcagcgacattgtagaaagcgtggccgctgtagagctcgatgatagcgacggggatgatgaacctatggtacaagttgaagctggtaaagtaaatcatagtgctagaagcgatctctctgacctaaaggtggctaccgacaatatcgttaaagatcttaagaaaattattactagaatctctgcagtatcgacggttctagaggatgttcaagcagctggtatctctagacaatttacttctatgactaaagctattacaacactatctgatctagtcaccgagggaaaatctaaagttgttcgtaaaaaagttaaaacttgtaagaagtaaatgcgtgcacttttttataaagatggtaaactctttaccgataataattttttaaatcctgtatcagacgataatccagcgtatgaggttttgcaacatgttaaaattcctactcatttaacagatgtagtagtatatgaacaaacgtgggaggaggcgttaactagattaatttttgtgggaagcgattcaaaaggacgtagacaatacttttacggaaaaatgcatgtacagaatcgcaacgctaaaagagatcgtatttttgttagagtatataacgttatgaaacgaattaattgttttataaacaaaaatataaagaaatcgtccacagattccaattatcagttggcggtttttatgttaatggaaactatgttttttattagatttggtaaaatgaaatatcttaaggagaatgaaacagtagggttattaacactaaaaaataaacacatagaaataagtcccgatgaaatagttatcaagtttgtaggaaaggacaaagtttcacatgaatttgttgttcataagtctaatagactatataaaccgctattgaaactgacggatgattctagtcccgaagaatttctgttcaacaaactaagtgaacgaaaggtatatgaatgtatcaaacagtttggtattagaatcaaggatctccgaacgtatggagtcaattatacgtttttatataatttttggacaaatgtaaagtccatatctcctcttccatcaccaaaaaagttaatagcattaactatcaaacaaactgctgaagtggtaggtcatactccatcaatttcaaaaagagcttatatggcaacgactattttagaaatggtaaaggataaaaattttttagatgtagtatctaaaactacgttcgatgaattcctatctatagtcgtagatcacgttaaatcatctacggatggatgatatagatctttacacaaataattacaagaccgataaatggaaatggataagcgtatgaaatctctcgcaatgacagctttcttcggagagctaagcacattagatattatggcattgataatgtctatatttaaacgccatccaaacaataccattttttcagtggataaggatggtcagtttatgattgatttcgaatacgataattataaggcttctcaatatttggatctgaccctcactccgatatctggagatgaatgcaagactcacgcatcgagtatagccgaacaattggcgtgtgtggatattattaaagaggatattagcgaatatatcaaaactactccccgtcttaaacgatttataaaaaaataccgcaatagatcagatactcgcatcagtcgagatacagaaaagcttaaaatagctctagctaaaggcatagattacgaatatataaaagacgcttgttaataagtaaatgaaaaaaaactagtcgtttataataaaacacgatatggatgccaacgtagtatcatcttctactattgcgacgtatatagacgctttagcgaagaatgcttcagaattagaacagaggtctaccgcatacgaaataaataatgaattggaactagtatttattaagccgccattgattactttgacaaatgtagtgaatatctctacgattcaggaatcgtttattcgatttaccgttactaataaggaaggtgttaaaattagaactaagattccattatctaaggtacatggtctagatgtaaaaaatgtacagttagtagatgctatagataacatagtttgggaaaagaaatcattagtgacggaaaatcgtcttcacaaagaatgcttgttgagactatcgacagaggaacgtcatatatttttggattacaagaaatatggatcctctatccgactagaattagtcaatcttattcaagcaaaaacaaaaaactttacgatagactttaagctaaaatattttctaggatccggtgcccaatctaaaagttctttgttgcacgctattaatcatccaaagtcaaggcctaatacatctctggaaatagaattcacacctagagacaatgaaacagttccatatgatgaactaataaaggaattgacgactctctcgcgtcatatatttatggcttctccagagaatgtaattctttctccgcctattaacgcgcctataaaaacctttatgttgcctaaacaagatatagtaggtttggatctggaaaatctatatgccgtaactaagactgacggcattcctataactatcagagttacatcaaacgggttgtattgttattttacacatcttggttatattattagatatcctgttaagagaataatagattccgaagtagtagtctttggtgaggcagttaaggataagaactggaccgtatatctcattaagctaatagagcctgtgaatgcaatcaatgatagactagaagaaagtaagtatgttgaatctaaactagtggatatttgtgatcggatagtattcaagtcaaagaaatacgaaggtccgtttactacaactagtgaagtcgtcgatatgttatctacatatttaccaaagcaaccagaaggtgttattctgttctattcaaagggacctaaatctaacattgattttaaaattaaaaaggaaaatactatagaccaaactgcaaatgtagtatttaggtacatgtccagtgaaccaattatctttggagaatcgtctatctttgtagagtataagaaatttagcaacgataaaggctttcctaaagaatatggttctggtaagattgtgttatataacggcgttaattatctaaataatatctattgtttggaatatattaatacacataatgaagtgggtattaagtccgtggttgtacctattaagtttatagcagaattcttagttaatggagaaatacttaaacctagaattgataaaaccatgaaatatattaactcagaagattattatggaaatcaacataatatcatagtcgaacatttaagagatcaaagcatcaaaataggagatatctttaacgaggataaactatcggatgtgggacatcaatacgccaataatgataaatttagattaaatccagaagttagttattttacgaataaacgaactagaggaccgttgggaattttatcaaactacgtcaagactcttcttatttctatgtattgttccaaaacatttttagacgattccaacaaacgaaaggtattggcgattgattttggaaacggtgctgacctggaaaaatacttttatggagagattgcgttattggtagcgacggatccggatgctgatgctatagctagaggaaatgaaagatacaacaaattaaactctggaattaaaaccaagtactacaaatttgactacattcaggaaactattcgatccgatacatttgtctctagtgtcagagaagtattctattttggaaagtttaatatcatcgactggcagtttgctatccattattcttttcatccgagacattatgctaccgtcatgaataacttatccgaactaactgcttctggaggcaaggtattaatcactaccatggacggagacaaattatcaaaattaacagataaaaagacttttataattcataagaatttacctagtagcgaaaactatatgtctgtagaaaaaatagctgatgatagaatagtggtatataatccatcaacaatgtctactccaatgactgaatacattatcaaaaagaacgatatagtcagagtgtttaacgaatacggatttgttcttgtagataacgttgatttcgctacaattatagaacgaagtaaaaagtttattaatggcgcatctacaatggaagatagaccgtctacaaaaaactttttcgaactaaatagaggagccattaaatgtgaaggtttagatgtcgaagacttacttagttactatgttgtttatgtcttttctaagcggtaaataataatatggtatgggttctgatatccccgttctaaatgcattaaataattccaatagagcgatttttgttcctataggaccttccaactgtggatactctgtattgttaatagatatattaatacttttgtcgggtaacagaggttctacgtcttctaaaaataaaagttttataacatctggcctgttcataaataaaaacttggcgattctatatatactcttattatcaaatctagccattgtcttatagatgtgagctactgtaggtgtaccatttgattttctttctaatactatatatttctctcgaagaagttcttgcacatcatctgggaataaaatactactgttgagtaaatcagttattttttttatatcgatattgatggacatttttatagttaaggataataagtatcccaaagtcgataacgacgataacgaagtatttatacttttaggaaatcacaatgactttatcagattaaaattaacaaaattaaaggagcatgtatttttttctgaatatattgtgactccagatacatatggatctttatgcgtcgaattaaatgggtctagttttcagcacggtggtagatatatagaggtggaggaatttatagatgctggaagacaagttagatggtgttctacatccaatcatatatctaaagatatacccgaagatatgcacactgataaatttgtcatttatgatatatacacttttgacgctttcaagaataaacgattggtattcgtacaggtacctccgtcgttaggagatgatagtcatttgactaatccgttattgtctccgtattatcgtaattcagtagccagacaaatggtcaataatatgatttttaatcaagattcatttttaaaatatttattagaacatctgattagaagccactatagagtttctaaacatataacaatagttagatacaaggataccgaagaattaaatctaacgagaatatgttataatagagataagtttaaggcgtttgtattcgcttggtttaacggcgtttcggaaaatgaaaaggtactagatacgtataaaaaggtatctaatttgatataatgaattcagtgactgtatcacacgcgccatatactattacttatcacgatgattgggaaccagtaatgagtcaattggtagagttttataacgaagtagccagttggctgctacgagacgagacgtcgcctattcctgataagttctttatacagttgaaacaaccgcttagaaataaacgagtatgtgtgtgcggtatagatccgtatccgaaagatggaactggtgtaccgttcgaatcaccaaattttacaaaaaaatcaattaaggagatagcttcatctatatctagattaaccggagtaattgattataaaggttataaccttaatataatagacggggttataccctggaattattacttaagttgtaaattaggagaaacaaaaagtcacgcgatctactgggataagatttccaagttactgctgcagcatataactaaacacgttagtgttctttattgtttgggtaaaacagatttctcgaatatacgggcaaagttagaatccccggtaactaccatagtcggatatcatccagcggctagagaccgccaattcgagaaagatagatcatttgaaattatcaacgttttactggaattagacaacaaggcacctataaattgggctcaagggtttatttattaatgctttagtgaaattttaacttgtgttctaaatggatgcggctattagaggtaatgatgttatctttgttcttaagactataggtgtcccgtcagcgtgcagacaaaatgaagatccaagatttgtagaagcatttaaatgcgacgagttagaaagatatattgagaataatccagaatgtacactattcgaaagtcttagggatgaggaagcatactctatagtcagaattttcatggatgtagatttagacgcgtgtctagacgaaatagattatttaacggctattcaagattttattatcgaggtgtcaaactgtgtagctagattcgcgtttacagaatgcggtgccattcatgaaaatgtaataaaatccatgagatctaatttttcattgactaagtctacaaatagagataaaacaagttttcatattatctttttagacacgtataccactatggatacattgatagctatgaaacgaacactattagaattaagtagatcatctgaaaatccactaaccagatcgatagacactgccgtatataggagaaaaacaactcttcgggttgtaggtactaggaaaaatccaaattgcgacactattcatgtaatgcaaccaccgcatgataatatagaagattacctattcacttacgtggatatgaacaacaatagttattacttttctctacaacaacgattggaggatttagttcctgataagttatgggaaccagggtttatttcattcgaagacgctataaaaagagtttcaaaaatattcattaattctataataaactttaatgatctcgatgaaaataattttacaacggtaccactggtcatagattacgtaacaccttgtgcattatgtaaaaaacgatcgcataaacatccgcatcaactatcgttggaaaatggtgctattagaatttacaaaactggtaatccacatagttgtaaagttaaaattgttccgttggatggtaataaactgtttaatattgcacaaagaattttagacactaactctgttttattaaccgaacgaggagaccatatagtttggattaataattcatggaaatttaacagcgaagaacccttgataacaaaactaattttgtcaataagacatcaactacctaaggaatattcaagcgaattactctgtccgaggaaacgaaagactgtagaagctaacatacgagacatgttagtagattcagtggagaccgatacctatccggataaacttccgtttaaaaatggtgtattggacctggtagacggaatgttttactctggagatgatgctaaaaaatatacgtgtactgtatcaaccggatttaaatttgacgatacaaagttcgtcgaagacagtccagaaatggaagagttaatgaatatcattaacgatatccaaccattaacggatgaaaataagaaaaatagagagctatatgaaaaaacattatctagttgtttatgcggtgctaccaaaggatgtttaacattcttttttggagaaactgcaactggaaagtcgacaaccaaacgtttgttaaagtctgctatcggtgacctgtttgttgagacgggtcaaacaattttaacagatgtattggataaaggacctaatccatttatcgctaacatgcatttgaaaagatctgtattctgtagcgaactacctgattttgcatgtagtgggtcaaagaaaatcagatctgataatattaaaaagttgacagaaccttgtgtcattggaagaccgtgtttctccaataaaattaataatagaaaccatgcgacaatcattatcgatactaattacaaacctgtttttgataggatagataacgcattaatgagaagaattgccgtcgtgcgattcagaacacacttttctcaaccttctggtagagaggctgctgaaaataatgacgcgtacgataaagtcaaactattagacgaggggttagatggtaaaatacaaaataatagatatagattcgcatttctatacttgttggtgaaatggtacagaaaatatcatgttcctattatgaaactatatcctacacccgaagagattcctgactttgcattctatctcaaaataggtactctgttagtatctagctctgtaaagcatattccattaatgacggacctctccaaaaagggatatatattgtacgataatgtggttactcttccgttgactactttccaacagaaaatatccaagtattttaattctagactatttggacacgatatagagagcttcatcaatagacataagaaatttgccaatgttagtgatgaatatctgcaatatatattcatagaggatatttcatctccgtaaatatatgctcatatatttatagaagatatcacatatctaaatgaataccggaatcatagatttatttgataatcatgttgatagtataccaactatattacctcatcagttagctactctagattatctagttagaactatcatagatgagaacagaagcgtgttattgttccatattatgggatcaggtaaaacaataatcgctttgttgttcgccttggtagcttccagatttaaaaaggtttacattctagtgccgaacatcaacatcttaaaaattttcaattataatatgggtgtagctatgaacttgtttaatgacgaattcatagctgagaatatctttattcattccacaacaagtttttattctcttaattataacgataacgtcattaattataacggattatctcgctacaataactctatttttatcgttgatgaggcacataatatctttgggaataatactggagaacttatgaccgtgataaaaaataaaaacaagattccttttttactattgtctggatctcccattactaacacacctaatactctgggtcatattatagatttaatgtccgaagagacgatagattttggtgaaattattagtcgtggtaagaaagtaattcagacacttcttaacgaacgcggtgtgaatgtacttaaggatttgcttaaaggaagaatatcatattacgaaatgcctgataaagatctaccaacgataagatatcacggacgtaagtttctagatactagagtagtatattgtcacatgtctaaacttcaagagagagattatatgattactagacgacagctatgttatcatgaaatgtttgataaaaatatgtataacgtgtcaatggcagtattgggacaacttaatctgatgaataatttagatactttatttcaggaacaggataaggaattgtacccaaatctgaaaataaataatggcgtgttatacggagaagaattggtaacgttaaacattagttccaaatttaaatactttattaatcggatacagacactcaacggaaaacattttatatacttttctaattctacatatggcggattggtaattaaatatatcatgctcagtaatggatattctgaatataatggttctcagggaactaatccacatatgataaacggcaaaccaaaaacatttgctatcgttactagtaaaatgaaatcgtctttagaggatctattagatgtgtataattctcctgaaaacgatgatggtagtcaattgatgtttttgttttcatcaaacattatgtccgaatcctatactctaaaagaggtaaggcatatttggtttatgactatcccagatactttttctcaatacaaccaaattcttggacgatctattagaaaattctcttacgccgatatttctgaaccagttaatgtatatcttttagccgccgtatattccgatttcaatgacgaagtgacgtcattaaacgattacacacaggatgaattaattaatgttttaccatttgacatcaaaaagctgttgtatctaaaatttaagacgaaagaaacgaatagaatatactctattcttcaagagatgtctgaaacgtattctcttccaccacatccatcaattgtaaaagttttattgggagaattggtcagacaatttttttataataattctcgtattaagtataacgataccaagttacttaaaatggttacatcagttataaaaaataaagaagacgctaggaattacatagatgatattgtaaacggtcacttctttgtatcgaataaagtatttgataaatctcttttatacaaatacgaaaacgatattattacagtaccgtttagactttcctacgaaccatttgtttggggagttaactttcgtaaagaatataacgtggtatcttctccataaaactgatgagatatataaagaaataaatgtcgagctttgttaccaatggatacctttccgttacattggaaccacacgagctgacgttagacataaaaactaatattaggaatgccgtatataagacgtatctccatagagaaattagtggtaaaatggccaagaaaatagaaattcgtgaagacgtggaattacctctcggcgaaatagttaataattctgtagttataaacgttccgtgtgtaataacctacgcgtattatcacgttggggatatagtcagaggaacattaaacatcgaagatgaatcaaatgtaactattcaatgtggagatttaatctgtaaactaagtagagattcgggtactgtatcatttagcgattcaaagtactgcttttttcgaaatggtaatgcgtatgacaatggcagcgaagtcactgccgttctaatggaggctcaacaaggtatcgaatctagttttgtttttctcgcgaatatcgtcgactcataaaaaagagaatagcggtaagtataaacacgaatactatggcaataattgcgaatgttttattctcttcgatatatttttgataatatgaaaaacatgtctctctcaaatcggacaaccatctcataaaatagttctcgcgcgctggagaggtagttgccgctcgtataatctctccagaataatatacttgcgtgtcgtcgttcaatttatacggatttctatagttctctgttatataatgcggtttgccctcatgattagacgacgacaatagtgttctaaatttagatagttgatcagaatgaatgtttattggcgttggaaaaattatccatacagcgtctgcagagtggttgatagttgttcctagatatgtaaaataatccaacttactaggcagcaaattgtctagataaaatactgaatcaaacggtgcagacgtattggcggatctaatggaatccaattgattaactatcttttgaaaatatacatttttatgatccaatacttgtaagaatatagaaataatgataagtccatcatcgtgtttttttgcctcttcataagaactatattttttcttattccaatgaacaagattaatctctccagagtatttgtacacatctatcaagtgattggatccataatcgtcttcctttccccaatatatatgtagtgatgataacacatattcattggggagaaaccctccacttatatatcctcctttaaaattaatccttactagttttccagtgttctggatagtggttggtttcgactcattataatgtatgtctaacggcttcaatcgcgcgttagaaattgcttttttagtttctatattaataggagatagttgttgcggcatagtaaaaatgaaatgataactgtttaaaaatagctcttagtatgggaattacaatggatgaggaagtgatatttgaaactcctagagaattaatatctattaaacgaataaaagatattccaagatcaaaagacacgcatgtgtttgctgcgtgtataacaagtgacggatatccgttaataggagctagaagaacttcattcgcgttccaggcgatattatctcaacaaaattcagattctatctttagagtatccactaaactattacggtttatgtactacaatgaactaagagaaatctttagacggttgagaaaaggttctatcaacaatatcgatcctcactttgaagagttaatattattgggtggtaaactagataaaaaggaatctattaaagattgtttaagaagagaattaaaagaggaaagtgatgaacgtataacagtaaaagaatttggaaatgtaattctaaaacttacaacacgggataaattatttaataaagtatatataagttattgcatggcgtgttttattaatcaatcgttggaggatttatcgcatactagtatttacaatgtagaaattagaaagattaaatcattaaatgattgtattaacgacgataaatacgaatatctgtcttatatttataatatgctagttaatagtaaatgaacttttacagatctagtataattagtcagattattaagtataatagacgactagctaagtctattatttgcgaggatgactctcaaattattacactcacggcattcgttaaccaatgcctatggtgtcataaacgagtatccgtgtccgctattttattaactactgataacaaaatattagtatgtaacagacgagatagttttctctattctgaaataattagaactagaaacatgtttagaaagaaacgattatttctgaattattccaattatttgaacaaacaggaaagaagtatactatcgtcatttttttctctagatccagctactactgataatgatagaatagatgctatttatccgggtggcatacccaaaaggggtgagaatgttccagagtgtttatccagggaaattaaagaagaagttaatatagacaattcttttgtattcatagacactcggttttttattcatggcatcatagaagataccattattaataaattttttgaggtaatcttctttgtcggaagaatatctctaacgagtgatcaaatcattgatacatttaaaagtaatcatgaaatcaaggatctaatatttttagatccgaattcaggtaatggactccaatacgaaattgcaaaatatgctctagatactgcaaaacttaaatgttacggccatagaggatgttattatgaatcattaaaaaaattaactgaggatgattgattagaaaatataaattaatttaccatcgtgtatttttataacgggattgtccggcatatcatgtagatagttaccgtctacatcgtatactcgaccatctacgcctttaaatcctctatttattgacattaatctattagaattggaataccaaatattagtaccctcaattagtttattggtaatattttttttagacgatagatcgatggctcttgaaaccaaggttttccaaccggactcattgtcgatcggtgagaagtctttttcattagcatgaatccattctaatgatgtatgtttaaacactctaaacaattggacaaattcttttgatttgctttgaatgatttcaaataggtcttcgtctacagtaggcataccattagataatctagccattataaagtgcacgtttacatatctacgttctggaggagtaagaacgtgactattgagacgaatggctcttcctactatctgacgaagagacgcctcgttccatgtcatatctaaaatgaagatatcattaattgagaaaaaactaataccctcgcctccactagaagagaatacgcatgttttaatgcattctccgttagtgtttgattcttggttaaactcagccaccgccttgattctagtatcttttgttctagatgagaactctatattagagataccaaagactttgaaatatagtaataagatttctattcctgactgattaacaaatggttcaaagactagacatttaccatgggatgctaatattcccaaacatacatctataaatttgacgcttttctcttttaattcagtaaatagagagatatcagccgcactagcatcccctttcaatagttctccctttttaaaggtatctaatgcggatttagaaaactctctatctcttaatgaatttttaaaatcattatatagtgttgctatctcttgcgcgtattcgcccggatcacgattttgtctttcaggaaagctatcgaacgtaaacgtagtagccatacgtctcagaattctaaatgatgatatacctgtttttatttcagcgagtttagccttttgataaatttcttcttgctttttcgacatattaacgtatcgcattaatactgttttcttagcgaatgatgcagacccttctacgtcatcaaaaatagaaaactcgttattaactatatacgaacatagtcctcctagtttggagactaattctttttcatcgactagacgtttattctcaaatagtgattggtgttgtaaggatcctggtcgtagtaagttaaccaacatggtgaattcttgcacactattgacgataggtgtagccgataaacaaatcatcttatggttttttaacgcaatggtcttagataaaaaattatatactgaacgagtaggacggatcttaccatcttctttgattaatgatttagaaatgaagttatgacattcatcaatgatgacgcatattctactcttggaattaatagttttgatattagtaaaaaatttatttctaaaattttgatcatcgtaattaataaaaatacaatccttcgttatctctggagcgtatctgagtatagtgttcatccaaggatcttctatcaaagcctttttcaccaataagataatagcccaattcgtataaatatccttaagatgtttgagaatatatacagtagtcattgttttaccgacacccgtttcatggaacaataaaagagaatgcatactgtctaatcctaagaaaactcttgctacaaaatgttgataatccttgaggcgtactacgtccgaccccatcatttcaacgggcatattagtagttctgcgtaaggcataatcgatataggccgcgtgtgatttactcatttatgagtgataagtaataactatgttttaaaaatcacagcagtagtttaactagtcttctctgatgtttgttttcgatactttttgaatcagaagtcatactagaataaagcaacgagtgaacgtaatagagagcttcgtatactctattcgaaaactctaagaacttattaatgaattccgtatccactggattgtttaaaatactaaattgaacactgttcacatccttccaagaagaagacttagtgacggacttaacatgagacataaataaatccaaattttttttacaaacatcactagccaccataatggcgctatctttcaaccagctatcgcttacgcattttagcagtctaacatttttaaagagactacaatatattctcatagtatcgattacacctctaccgaataaagttggaagtttaataatacaatatttttcgtttacaaaatcaaataatggtcgaaacacgtcgaaggttaacatcttataatcgctaatgtatagattgttttcagtgagatgattattagatttaatagcatctcgttcacgtttgaacagtttattgcgtgcgctgaggtcggcaactacggcgtccgctttagtactcctcccataatactttacgctattaatctttaaaatttcatagactttatctagatcgctttctggtaacatgatatcatgtgtaaaaagttttaacatgtcggtcggcattctatttagatcattaactctagaaatctgaagaaagtaattagctccgtattccagactaggtaatgggcttttacctagagacagattaagttctggcaatgtttcataaaatggaagaaggacatgcgttccctcccggatattttttacaatttcatccatttacaactctatagtttgttttcattattattagttattatctcccataatcttggtaatacttaccccttgatcgtaagataccttatacaggtcattacatacaactaccaattgtttttgtacataatagattggatggttgacatccatggtggaataaactactcgaacagatagtttatctttccccctagatacattagccgtaatagttgtcggcctaaagaatatctttggtgtaaagttaaaagttagggttcttgttccattattgctttttgtcagtagttcattataaattctcgagatgggtccgttctctgaatatagaacatcatttccaaatctaacttctagtctagaaataatatcggtcttattcttaaaatctattcccttgatgaagggatcgttaatgaacaaatccttggcctttgattcggctgatctattatctccgttatagacgttacgttgactagtccaaagacttacaggaatagatgtatcgatgatgttgatactatgtgatatgtgagcaaagattgttctcttagtggcatcactatatgttccagtaatggcggaaaactttttagaaatgttatatataaaagaattttttcgtgttccaaacattagcagattagtatgaagataaacactcatattatcaggaacattatcaatttttacatacacatcagcatcttgaatagaaacgataccatcttctggaacctctacgatctcggcagactccggataaccagtcggtgggccatcgctaacaataactagatcatccaacaatctactcacatatgcatctatataatctttttcatcttgtgagtaccctggatacgaaataaatttattatccgtatttccataataaggtttagtataaacagagagagatgttgccgcatgaacttcagttacagtcgccgttggttggtttatttgacctattactctcctaggtttctctataaacgatggtttaatttgtacattcttaaccatatatccaataaagctcaattcaggaacataaacaaattctttgttgaacgtttcaaagtcgaacgaagagtcacgaataacgatatcggatactggattgaaggttaccgttacggtaatttttgaatcggatagtttaagactgctgaatgtatcttccacatcaaacggagttttaatataaacgtatactgtagatggttctttaatagtgtcattaggagttaggccaatagaaatatcattaagttcactagaatatccagagtgtttcaaagcaattgtattattgatacaattattatataattcttcgccctcaatttcccaaataacaccgttacacgaagagatagatacgtgattaatacatttatatccaacatatggtacgtaactgaatcttcccatacctttaacttctggaagttccaaactcagaaccaaatgattaagcgcagtaatatactgatccctaatttcgaagctagcgatagcctgattgtctggaccatcgtttgtcataactccggatagagaaatatattgcggcatatataaagttggaatttgactatcgactgcgaagacattagaccgtttaatagagtcatccccaccgatcaaagaattaatgatagtattattcattttctatttaaaatggaaaaagcttacaataaactccgtagagaaatatctataatttgtgagttttccttaaagtaacagcttccgtaaacgccgtctttatctcttagtaggtttattgtatttatgaccttttccttatcttcatagaatactaaaggcaacaaagaaatttttggttcttctctaagagctacgtgagacttaaccatagaagccaacgaatccctacatattttagaacagaaataccctacttcaccacccttgtatgtctcaatactaataggtctaaaaaccaaatcttgattacaaaaccaacacttatcaattacactatttgtcttaatagacacatctgccatagatttataatactttggtagtatacaagcgagtgcttcttctttagcgggcttaaagactgctttaggtgctgaaataaccacatctggaaggcttactcgcttagccatttaattacggaactatttttttatacttctaatgagcaagtagaaaacctctcatctacaaaaacgtactcgtgtccataatcctctaccatagttacacgttttttagatctcatatgtgctaaaaagttttcccatactaattggttactattatttttcgtataatttttaacagtttgaggttttagatttttagttacagaagtgatatcgaatattttatccaaaaagaatgaataattaattgtcttagaaggagtgttttcttggcaaaagaataccaagtgcttaaatatttctactacttcattaatcttttctgtactcagattcagtttctcatcttttacttgattgattatttcaaagactaacttataatcctttttatttattctctcgttagccttaagaaaactagatacaaaatttgcatctacatcatccgtggatatttgatttttttccatgatatccaagagttccgagataatttctccagaacattgatgagacaataatctccgcaatacatttctcaaatgaataagtttattagacacgtggaagtttgactttttttgtacctttgtacatttttgaaataccgactcgcaaaaaatacaatattcatatccttgttcagatactataccgttatgtctacaaccgctacataatcgtagattcatgttaacactctacgtatctcgtcgtccaatattttatataaaaacattttatttctagacgttgccagaaaatcctgtaatatttttagttttttgggctgtgaataaagtatcgccctaatattgttaccgtcttccgccaatatagtagttaaattatccgcacatgcagaagaacaccgcttaggcggattcagtacaatgttatatttttcgtaccaactcatttaaatatcataatctaaaatagttctgtaatatgtctagcgctaatatattgatcataatcctgtgcataaattaagatacaacaatgtctcgaaatcatcgacatggcttcttccatagttagaagatcgtcgtcaaagttagcaacgtgattcatcaacatttgctgttttgaggcagcaaatactgaaccgtcgccattcaaccattcataaaaaccatcgtctgaatccattgataatttcttgtactggtttttgagagctcgcatcaatctagcatttctagctcccggattgaaaacagaaagaggatcgtacatccagggtccattttctgtaaatagaatcgtataatgtcccttcaagaagatatcagacgatccacaatcaaagaattggtctccgagtttgtaacaaactgcggactttaacctatacatgataccgtttagcataatttctggtgatacgtcaatcggagtatcatctattagagatctaaagccggtgtaacattctccaccaaacatattcttattctgacgtcgttctacataaaacatcattgctccattaacgataacaggggaatgaacagcactacccatcacattagttcccaatggatcaatgtgtgtaactccagaacatcttccatagcctatgttaggaggagcgaacaccactcttccactattgccatcgaatgccatagaataaatatccttggaattgatagaaatcggactgtcggatgttgtgatcatcttcataggattaacaactatgtatggtgccgcctgaagtttcatatcgtaactgatgccgtttataggtctagccacagaaaccaacgtaggtctaaatccaactatagacaaaatagaagccaatatctgttcctcatctgtcataacttgagagcatccagtatgaataatcttcattagatggggatctaccgcatcatcatcgttacaataaaaaattcccattctaatgttcataattgcttttctaatcatggtatgcatgtttgctctctgaatctctgtggaaattagatctgatacacctgtaatcactatcggattatcctccgtaagacgattaaccaacaacatataattataagactttacttttctaaattcataaagttgctggattaggctataggtgtctccatgtacatacgcgttctcgagcgcaggaagtttaataccgaatagtgccatcagaataggatgaatatagtaattagtttctggttttctataaataaaagacaaatcttgtgaactagacatatcggtaaaatgcatggattggaatcgtgtagtcgacagaagaatatgatgattagatggagagtatattttatctaactctttgagttggtcaccgattctaggactagctcgagaatgaataagtactaaaggatgagtacatttcacagaaacactagcattgttcaatgtgctctttacatgggtaaggagttgaaatagctcgtttctatttgttctgacaatatttagtttattcataatgttaagcatatcctgaatagtaaagttagatgtgtcatacttgttagtagttagatatttagcaattgcattcccatcatttctcaatctcgtactccaatcatgcgtggatgctacttcgtcgatggaaaccatacaatcctttttgataggctgttgagattgattatttcctgcacgtttaggtttggtacgttgatttctagcccctgcggatataaagtcatcgtctacaatttgggacaatgaattgcatacactacaagacaaagatttatcagaagtgtgaatatgatcttcatctaccaaagaaagagtttgattagtataactagattttagtcctgcgttagatgttaaaaaaacatcgctattgaccacggcttccattatttatattcgtagtttttactcgaaagcgtgattttaatatccaatcttattacttttggaatcgttcaaaacctttgactaattgtagaatttgatctattgccctacgcgtatactcccttgcatcatatacgttcgtcaccagatcgtttgtttcggcctgaagttggtgcatatctctttcaacattcgacatgagatccttaagggccatatcgtctagattttgttgagatgctgctcctggatttggattttgttgtgctgttgtacatactgtaccaccagtaggtgtaggagtacatacagtggccacaataggaggttgaggaggtgtaaccgttggagtagtacaagaaatatttccatccgattgttgtgtacatgtagttgttggtaacgtctgagaaggttgggtagatggcggtgtcgtcgtcttttgatctttattaaatttagagataatatcctgaacagcattgctcggcgtcaacgctggaaggagtgaactcgccggcgcatcagtatctgcagacagccaatcaaaaagattagacatatcagatgatgtattagtttgttgtcgtggttttggtgtaggagcagtactactaggtagaagaataggagccggtgtagctgttggaaccggctgtggagttatatgaatagttggttgtagcggttggataggctgtctgctggcggccatcatattatctctagctagttgttctcgcaactgtctttgataatacgactcttgagactttagtcctatttcaatcgcttcatcctttttcgtatccggatccttttcttcagaataatagattgacgactttggtgtagaggattctgccagcctctgtgagaacttgttaaagaagtccatttaaggctttaaaattgaattgcgattataagattaaatggcagacacagacgatattatcgactatgaatccgatgatctcaccgaatacgaggatgatgaagaagaggaagaagatggagagtcactagaaactagtgatatagatcccaaatcttcttataagattgtagaatcagcatccactcatatagaagatgcgcattccaatcttaaacatatagggaatcatatatctgctcttaaacgacgctatactagacgtataagtctatttgaaatagcgggtataatagcagaaagctataacttgcttcaacgaggaagattacctctagtttcagaattttctgacgaaacgatgaagcaaaatatgctacatgtaattatacaagagatagaggagggttcttgtcctatagtcatcgaaaagaacggagaattgttgtcggtaaacgattttgacaaagatggtctaaaattccatctagactatattatcaaaatttggaaacttcaaaaacgatattagaatttatacgaatatcgttctctaaatgtcacaatcaagtctcgcatgttcagcaatttattgtcgtactttatatcgtgttcattaacgatattttgcaaaatagtaatgattctatcttccttcgatagatattcttcagagattattgtcttatattctttcttgttatccgatatgaatttgataagactttgaacattattgatacccgtctgtttaattttttctacagatattttagttttggcagattctatcgtatctgtcaatagacatccaacatcgacattcgacgtcaattgtctataaatcaacgtataaattttagaaataacattagcgaattgttgtgcattgatgtcgttattctgaaacagtatgattttaggtagcattttcttaacaaagagaacgtatttattgttactcagttgaacagatgatatatccagattactaacgcatctgattccgtataccaaactttcagaagaaatggtatacaattgtttgtattcattcaatgtctctttttcagaaattagtttagagtcgaatactgcaataattttcaagagatagttttcatcagataagattttatttagtgtagatatgataaaactattgttttgttggagaacttgatacgccgcgttctctgtagtcgacgctctcaaatgggaaacaatctccattatttttttggaatcggatactatatcttcggtatcttgacgcagtctagtatacatagagttaagagagattagagtttgtacattaagcaacatgtctctaaatgtggctacaaacttttcctttttcacatcatctagtttattatataccgatttcacaacggcaccagatttaaggaaccagaatgaaaaactctgataactacaatatttcatcatagttacgattttatcatcttctatagttggtgtaatagcgcatacctttttctccaagactggaaccaacgtcataaaaatgtttaaatcaaaatccatatcaacatctgatgcgctaagaccagtctcgcgttcaagattatctttactaatggtgacgaactcatcgtataaaactctaagtttgtccattatttatttacagatttagttgtttaatttatttgtgctcttccagagttgggatagtatttttctaacgtcggtattatattattaggatctacgttcatatgtatcataatattaatcatccacgttttgataaatctatctttagcttctgaaataacgtatttaaacaaaggagaaaaatatttagctacggcatcagacgcaataacattttttgtaaatgtaacgtatttagacgacagatcttcgttaaaaagttttccatctatgtagaatccatcggttgttaacaccattcccgcgtcagattgaataggagtttgaatagtttgttttggaaatagatccttcaataacttatagttgggtgggaaaaaatcgattttatcactagactctttcttttttactatcattacctcatgaactatttcttgaatgagtatatgtattttctttcctatatcggacgcgttcattggaaaatataccatgtcgttaactataagaatatttttatcctcgtttacaaactgaataatatcagatgtagttcgtaaacgaactatatcatcaccagcacaacatctaactatatgatatccactagtttcctttagccgtttattatcttgttccatattagcagtcattccatcatttaagaaggcgtcaaagataatagggagaaatgacattttggattctgttacgactttaccaaaattaaggatatacggacttactatctttttctcaacgtcaatttgatgaacacacgatgaaaatgtgcttctatgagattgatcatgtagaaaacaacaagggatacaatatttccgcatatcatgaaatatattaagaaatcccaccttattatatttccccaaaggatccatgcacgtaaacattatgccgttatcattaataaagacttctttctcatcggatctgtaaaagttgttactgatttttttcattccaggatctagataattaataatgatgggttttctattcttattctttgtattttggcatatcctagaccagtaaacagtttccactttggtaaaatcagcagacttttgaacgctattaaacatggcattaatggcaataactaaaaatgtaaaatatttttctatgttaggaatatggtttttcactttaatagatatatggtttttggccaaaatgatagatatttttttatccgaggatagtaaaatattattagtcgccgtctctataaaaatgaagctagtctcgatatccaattttattctagaattgataggagtcgccaaatgtaccttatacgttatatctcccttgatgcgttccatttgtgtatctatatcggacacaagatctgtaaatagttttacgttattaatcatcacggtatcgccgtcgctagataacgctaatgtaccatccaagtcccaaatggagagatttaactgttcatcgtttagaataaaatgattaccggtcatattaataaagtgttcatcgtatctagataacaacgacttataattaatgtccaagtcttgaactcgctgaatgatcttttttaacccagttagttttagattggtacgaaatatattgttaaactttgattctacagtaatgtccaaatctagttgtggaaatacttccatcaacattgtttcaaacttgataatattattatctacatcttcgtacgatccaaattccggaatagatgtatcgcacgctctggccacccagataaccaaaaagtcacacgctccaggatatacattgtataaaaagctatcgttttttagtagggtttttttctgcgtgtatacgaagggattaaaaatagtattatcaacgtaactatattccaaattattcttatgagaatagataataatatcgtccttaatatctaacaaatttcctaaatatccctttaattgagtcattcgaagcgtcaatagaatatgtctcttaactatttccggctgttgtatatttaaatgacttcgtaaaaaataatatatgggcgacttctcatctatgtaatcatatggagtgagatatagggctcgttctacctcctgccccttacccacctgtaataccaattgcggacttactatatatcgcatatttatatcgtggggtaaagtgaaaatctactaccgatgatgtaagtcttacaatgttcgaaccagtaccagatcttaatttggaggcctccgtagaactaggggaggtaaatatagatcaaacaacacctatgataaaggagaatagcggttttatatcccgcagtagacgtctattcgcccatagatctaaggatgatgagagaaaactagcactacgattctttttacaaagactttattttttagatcatagagagattcattatttgttcagatgcgttgacgctgtaaaagacgtcactattaccaaaaaaaataacattatcgtggcgccttatatagcacttttaactatcgcatcaaaaggatgcaaacttacagaaacaatgattgaagcattctttccagaactatataatgaacatagtaagaaatttaaattcaactctcaagtatccatcatccaagaaaaactcggataccagtttggaaactatcacgtttatgattttgaaccgtattactctacagtagctctggctattcgagatgaacattcatctggcatttttaatatccgtcaagagagttatctggtaagttcattatctgaaataacatatagattttatctaattaatctaaaatctgatcttgttcaatggagtgctagtacgggcgctgtaattaatcaaatggtaaatactgtattgattacagtgtatgaaaagttacaactggtcatagaaaatgattcacaatttacatgttcattggctgtggaatcaaaacttccaataaaattacttaaagatagaaatgaattatttacaaaattcattaacgagttaaaaaagaccagttcattcaagataagcaaacgcgataaggatacgctactaaaatattttacttaggactggagttagaatttatagacgactcatttcgtttatcattgttactattattactattactatcattattagtgttggcattattagtattcttcttgtcatcttgttcagaaatatacagcaatgctatacctaatactaaatacattatcatgctcgcaatggctctaacaacaacgaaccaaaatgaatttggtcgtagcttttgttcacaaaaatacataaagaaatgtctacataaatctatggcgccattggctacttgaaatagcgccagtcctcctacagattttaatatagctgtataacatgacatttattcatcatcaaaagagacagagtcaccatctgtcatatttagattttttttcatgtgttcaaagtatcctctactcatttcattataatagtttatcatacttagaattttaggacggatcaatgagtaagacttgactagatcgtcagtagtaatttgtgcatcgtctattctgcatccgcttcgtcgaataatgtatagcatcgctttgagattctccatagctatcaagtctttatacaatgacatggaaatatctgtgaatactttatacttctccaacatcgatgccttaacatcatcgcctactttagcattgaaaatacgttctattgtgtagatggatgtagcaagatttttaaacaacaatgccatcttacacgatgattgcctcaagtctccaatcgtttgtttagaacgattagctacagagtccaatgcttggctgactagcatattattatctttagaaattgtattcttcaatgaggcgtttatcatatctgtgatttcgttagtcatattacagtctgactgggttgtaatgttatccaacatatcacctatggatacggtacacgtaccagcatttgtaataatcctatctaagatgttgtatggcattgcgcagaaaatatcttctcctgtaatatctccactctcgataaatctactcagattattcttaaatgccttattctctggagaaaagatatcagtgtccatcatttcattaatagtatacgcagaaaagataccacgagtatcaattctatccaagatacttatcggttccgagtcacagataatggtttcctctccttcgggagatcctgcatagaaatatctaggacaatagtttctatactgtctgtaactctgataatctctaaagtcactaactgataccatgaaattgagaagatcaaacgctgaagtaattaatttttctgcctcgtttttactacaactagttttcatcaatgtagtgacgatgtattgtttagttacttttggtctaatactgatgatagagatattattgcttcccataatggatcttctagtagtcaccttaaagcccattgatgcgaatagcagatagataaagtcttggtatgactcctttctaatatagtacggactacctttgtcacccaactttatacccacataagccataacaacctctttaatagccgtttcatgaggtttatcagccatgagcctgagtagttggaagaatctcatgaatcccgtctcagaaagtcctatatgcatgatagatttatctttcctgggaaactctcgtatagtcatagatgaaatactctttaaagtttctgaaataagattagtaacagtcttacctccgactactctaggtaacaaacaaactctaataggtgttttctctgcggagataatatcagaaaggatagagcaataagtagtattattgtgattataaagaccgaatacataacaggtagaatttataaacatcatgtcctgaaggtttttagacttgtattcctcgtaatccataccgtcccaaaacatggatttggtaactttgatagccgtagatctttgttccttcgccaacaggttaaagaaattaataaagaatttgttgtttctatttatgtccacaaattgcacgtttggaagcgccacggttacattcactgcagcattttgaggatcgcgagtatgaagtacgatgttattgtttactggtatatctggaaagaaatctaccagtctaggaataagagattgatatcgcatagaaatagtaaagtttataatctcatcatcgaagagcattttgttaccattgtaataaatatccactctgtcatatgtataaatgaagtactgttcaaacatgatgagatgtttatatgttggcatagtagtgagatcgacgtttggtaatggcaatgtattaagattaactccataatgtctagcagcatctgcgatgttataagcgtcgtcaaagcggggtcgatcttgtattgttatatattgtctaacacctataagattatcaaaatcttgtctgcttaatacaccgttaacaatttttgccttgaattcttttattggtgcattaataacatccttatagaggatgttaaacaaataagtgttatcaaagttaagatctggatatttcttttctgctagaacatccattgagtcggagccatctggtttaatataaccaccgataaatctagctctgtattctgtatccgtcaatctaatattaagaaggtgttgagtgaaaggtggaagatcgtaaaagctgtgagtattaatgataggattagtttccgaactaatgttaattggggtattaataatatctatatttccagcgttaagtgtaacattaaacagttttaattcacgtgacgtggtatcaattaaataattaatgcccaatttggatatagcagcctgaagctcatcttgtttagttacggatcctaatgagttattaagcaatatatcgaacggatgaacgaaggttgttttaagttggtcacatactttgtaatctagacatagatgcggaagaacggtagaaactatacgaaataaatattcagagtcctctaattgatcaagagtaactattgacttaataggcatcatttatttagtattaaatgacgaccgtaccagtgacggatatacaaaacgatttaattacagagttttcagaagataattatccatctaacaaaaattatgaaataactcttcgtcaaatgtctattctaactcacgttaacaacgtggtagatagagaacataatgccgccgtagtgtcatctccagaggaaatatcctcacaacttaatgaagatctatttccagatgatgattcaccggccactattatcgaacgagtacaacctcatactactattattgacgatactccacctcctacgtttcgtagagagttattaatatcggaacaacgtcaacaacgagaaaaaagatttaatattacagtatcgaaaaatgctgaagcaataatggaatctagatctatgataacttctataccaacacaaacaccatccttgggagtagtttatgataaagataaaagaattcagatgttagaggatgaagtggttaatcttagaaatcaacgatctaatacaaaatcatctgataatttagataattttaccaaaatactatttggtaagactccgtacaaatcaacagaagttaataagcgtatagccatcgttaattatgcaaatttgaacgggtcccccttatcagtcgaggacttggatgtttgttcggaggatgaaatagatagaatctataaaacgattaaacaatatcacgaaagtagaaaacgaaaaattatcgtcactaacgtgattattattgtcataaacattatcgagcaggcattgctaaaactcggatttgaagaaatcaaaggactgagtaccgatatcacttcagaaattatcgatgtggagatcggagatgactgcgatgctgtagcatctaaactaggaatcggtaacagtccggttcttaatattgtattgtttatactcaagatattcgttaaacgaattaaaattatttaatttaatacattcccatatccagacaacaatcgtctggattaatctgttcctgtcgtctcataccggacgacatattaatctttttattagtgggcatctttttagatggtttctttttcccagcattaactgagtcgatacctagaagatcgtgattgatctctccgaccattccacgaacttctaattggccgtctctgacggtaccataaactattttaccagcattagtaacagcttggacaatctgaccatccatcgcattgtacgatgtagtagtaactgttgttctacgtctaggagcaccagaagtatttttggagcccttggatgttgatgtagaagaagacgaggattttgattttggtttacatgtaatacattttgaactctttgattttgtatcacatgcgccggcagtcacatctgtttgagaattaagattattgttgcctcctttgacggctgcatctccaccgatttgcgctagtagatttttaagctgtggtgtaatcttattaactgtttcgatataatcatcgtaactgcttctaacggctaaattttttttatccgccatttagaagctaaaaatatttttatttatgcagaagatttaactagattatacaatgaactaatatgatccttttccagattatttacaaacttggtattttttggttctggaggaggcgaatttaaattcggacttggattcggattttgtaagttcttgatcttattatacatcgagtataggatggcgacagtaactgctacacaaataccgatcaaaagaagaataccaatcatttattgacaataacttcactattgatcaagtatgcaatatatcatcttttcactaaataagtagtaataatgattcaacaatgtcgagatatatggacgataataatttagttcatggaaatatcgctatgattggtgtgaatgactccgctaactctgtggggtgcgcagtgctttccccacatagaataaattagcattccgactgtgataataataccaagtataaacgccataatactcaatactttccatgtacgagtgggactggtagacttactaaagtcaataaaggcgaagatacacgaaagaatcaaaagaatgattccagcgattagcacgccggaaaaataatttccaatcataagcatcatgtccatttaactaataaaaattttaaatcgccgaatgaacaaagtggaatataaaccatataaaaacaatagtttgtactgcaaaaataatatctatttttgttttcgaagatatggtaaaattaaatagtagtacacagcatgttataactaacagcagcaacggctcgtaattacttatcatttactagacgaaaaggtggtgggatattttcttgctcaaataatacgaatatatcacccatccattttatgcgatgtttatatactctaatctttaatagatctatagacgacgggtttaccaacaatatagattttatcgattcatctaatttaaacccttccttaaacgtgaatgatctattatctggcataacgatgaccctacctgatgaatcggacaatgtactgggccatgtagaataaattatcaacgaattatcgtctacgaacatttatatcatttgttttaattttaggacgcgaataaatggatataaaatagaaaataacagatattacaaccagtgttatggccgcgcccaaccaggtaggcagttttattttatcttttactacaggttctcctggatgtacgtcaccaacggcggacgtagttctagtacaattagacgtaagttccgcttgggaattttttaacgctaaagagttaacgttaatcgtgcacccaacgtatttacatctagttcgttgaacatcttgattataatataaccattttctatctctagattcgtcagtgcactcatgtaaccaacataccctaggtcctaaatatttatctccggaattagattttggataattcgcgcaccaacaatttctatttcctttatgatcgttacaaaagacgtataatgccgtatccccaaaagtaaaataatcaggacgaataattctaataaactcagaacaatatctcgcatccatatgtttggagcaaatatcggaataagtagacatagccggtttccgttttgcacgtaaccattctaaacaattggggtttccaggatcgtttctacaaaatccagtcatgaaatcgtcacaatgttctgtcttgtaattattattaaatatttttggacagtgtttggtatttgtcttagaacaacattttgccacgctatcactatcgcccaggagataatccttttttataaaatgacatcgttgcccggatgctatataatcagtagcgtgttttaaatccttaatatattcaggagttacctcgttctgataatagattaatgatccaggacgaaatttgaaagaactacatggttctccatgaattaatacatattgtttagcaaattcaggaactataaaactactacaatgatctatcgacataccatctatcaaacaaaacttgggtttaatttctcccggagatgtttcataatagtacgtataactttcttctgcaaacttaacagctctattatattcaggataattaaaacctaattccatatatttgtctcgtatatctgctattcctggtgctattttgattctattaagagtaacagctgcccccattcttaataatcgtcagtatttaaactgttaaatgttggtatatcaacatctaccttatttcccgcagtataaggtttgttgcaggtatactgttcaggaatggttacatttatacttcttctatagtcctgtctttcgatgttcatcacatatgcaaagaacagaataaacaaaataatgtaagaaataatattaaatatctgtgaattcgtaaatacattgattgccataataattacagcagctacaatacatacaatagacattcccacagtgttgccattacctccacgatacatttgagttactaagcaataggtaataactaagctagtaagaggcaatagaaaagatgagataaatatcatcaatatagagattagaggagggctatatagagccaagacgaacaaaatcaaaccgagtaacgttctaacatcattatttttgaagattcccaaataatcattcattcctccataatcgttttgcatcatacctccatctttaggcataaacgattgctgctgttcctctgtaaataaatctttatcaagcactccagcacccgcagagaagtcgtcaagcatattgtaatatcttaaataactcatttatatattaaaaaatgtcactattaaagatggagtataatctttatgccgaactaaaaaaaatgacttgtggtcaacccctaagtctttttaacgaagacggggatttcgtagaagttgaaccgggatcatcctttaagtttctgatacctaagggattttacgcctctccttccgtaaagacgagtctagtattcgagacattaacaacgaccgataataaaatcactagtatcaatccaacaaatgcgccaaagttatatcctcttcaacgcaaagtcgtatctgaagtagtttctaatatgaggaaaatgatcgaatcaaaacgtcctctatacattactcttcacttggcgtgtggatttggtaagactattaccacgtgttatcttatggctacacacggtagaaaaaccgtcatttgcgtacccaataaaatgttaatacatcaatggaagacacaggtagaggcagtcggattggaacataagatatccatagatggagtaagtagtctattaaaggaactaaagactcaaagtccggatgtattaatagtagtcagtagacatctgacaaacgatgccttttgtaaatatatcaataagcattatgatttgttcatcttggatgaatcacatacgtataatctgatgaacaatacagcagttacaagatttttagcgtattatcctccgatgatgtgttattttttaactgctacacctagaccatctaaccgaatttattgtaacagtattattaatattgccaagttatccaatctaaaaaaaactatctatgcagtagatagtttttttgagccatattccacagataatattagacatatggtaaaacgactagatggaccatctaataaatatcatatatataccgagaagttattatctgtagacgagcctagaaatcaacttattcttgataccctggtagaagaattcaagtcaggaactattaatcgcattttagttattactaaactacgtgaacatatggtattattctacaaacgattattagattttttcggaccagaggttgtatttataggagacgcccaaaatagacgtactccagatatggtcaaatcaatcaaggaactaaatagatttatattcgtatccaccttattttattccggtactggtttagatattcctagtttggattcgttgttcatttgctcggcagtaatcaacaatatgcaaatagagcaattactagggagggtatgtcgagaaacagaactattagataggacggtatatgtatttcctaacacatccatcaaagaaataaagtacatgataggaaatttcatgcaacgaattattagtctgtctgtagataaactaggatttaaacaaaaaagttatcggaaacatcaagaatccgatcccacttctgcatgtacaacatcatccagagaagaacgtgtattaaatagaatatttaactcgcaaaatcgttaagaagtttaagcgacgatccgcatgctgcgcaggccagtgtattacccctcatagtattaatataatccaatgatacttttgtgatgtcggaaatcttaaccaatttagactgacaggcagaacacgtcatgcaatcatcatcgtcatcgataactgtagtcttgggcttctttttgcgactcttcattccggaacgcacattggtgctatccatttaggtagtaaaaaataagtcagaatatgccctataacacgatcgtgcaaaacctggtatatcgtctctatctttatcacaatatagtgtatcgacatttttattattattgacctcgtttatcttggaacatggaatgggaacatttttgttatcaacggccatctttgccttaattccagatgttgtaaaattataactaaacagtctatcatcgacacaaatgaaattcttgtttagacgtttgtagtttacgtatgcggctcgttcgcgtctcattttttcagatattgcaggtactataatattaaaaataagaatgaaataacataggattaaaaataaagttatcatgacttctagcgctgatttaactaacttaaaagaattacttagtctgtacaaaagtttgagattttcagattctgcggctatagaaaagtataattctttggtagaatggggaacatctacttactggaaaataggcgtgcaaaaggtagctaatgtcgagacgtcaatatctgattattatgatgaggtaaaaaataaaccgtttaatattgatccgggctattacattttcttaccggtatattttgggagcgtctttatttattcgaagggtaaaaatatggtagaacttggatctggaaactcttttcaaataccagatgatatgcgaagtgcgtgtaacaaagtattagacagcgataacggaatagactttctgagatttgttttgttaaacaatagatggataatggaagatgctatatcaaaatatcagtctccagttaatatatttaaactagctagtgagtacggattaaacatacccaaatatttagaaattgaaatagaggaagacacattatttgacgacgagttatactctattatagaacgctctttcgatgataaatttccaaaaatatccatatcgtatattaagttgggagaacttagacggcaagttgtagactttttcaaattctcattcatgtatattgagtccatcaaggtagatcgtataggagataatatttttattcctagcgttataacaaaatcaggaaaaaagatattagtaaaagatgtagaccatttaatacgatccaaggttagagaacatacatttgtaaaagtaaaaaagaaaaacacattttccattttatacgactatgatggaaacggaacagaaactagaggagaagtaataaaacgaattatagacactataggacgagactattatgttaacggaaagtatttctctaaggttggtagtgcaggcttaaagcaattgactaataaattagatattaatgagtgcgcaactgtcgatgagttagttgatgagattaataaatccggaactgtaaaacgaaaaataaaaaaccaatcagcatttgatttaagcagagaatgtttgggatatccagaagcggattttataacgttagttaataacatgcggttcaaaatagaaaattgtaaggttgtaaatttcaatattgaaaatactaattgtttaaataacccgagtattgaaactatatatggaaactttaaccagttcgtctcaatctttaatgtcgtcaccgatgtcaaaaaaagattattcgagtgaaataatatgcgcctttgatataggtgcaaaaaatcctgccagaactgttttagaagtcaaggataactccgttagggtattggatatatcaaaattagactggagttctgattgggaaaggcgcatagctaaagatttgtcacaatatgaatacactacagttcttctagaacgtcagcctagaaggtcgccgtatgttaaatttatctattttattaaaggctttttatatcatacatcggctgccaaagttatttgcgtctcgcctgtcatgtctggtaattcatatagagatcgaaaaaagagatcggtcgaagcatttcttgattggatggacacattcggattgcgagactccgttccggatagacgcaaattagacgatgtagcggatagtttcaatttggctatgagatacgtattagataaatggaatactaattatacaccttataataggtgtaaatctagaaattacataaaaaaaatgtaataacgttagtaacgccattatggataatctatttacctttctacatgaaatagaagatagatatgccagaactatttttaactttcatctaataagttgcgatgaaataggagatatatatggtcttatgaaagaacgcatttccttagaggatatgtttgataatatagtgtataataaagatatacatcctgccattaagaaactagtgtattgcgacatccaacttactaaacacattattaatcagaatacgtatccggtatttaacgattcttcacaagtgaaatgttgtcattatttcgacataaactcagataatagcaatattagctctcgtacagtagagatatttgagagggaaaagtcatctcttgtatcatatattaaaactaccaataagaagagaaaggtcaattacggcgaaataaagaaaactgttcatggaggcactaatgcaaattacttttccggtaaaaagtctgacgagtatctgagtactacagttagatccaacattaatcaaccttggatcaaaaccatctctaagaggatgagagttgatatcattaatcactctatagtaacgcgtggaaaaagctctatattacaaactatagaaattatttttactaatagaacatgtgtgaaaatattcaaggattctactatgcacattattctatccaaggacaaggatgaaaaggggtgtatacacatgattgacaaattattctatgtctattataatttatttctgttgttcgaagatatcatccaaaacgagtactttaaagaagtagctaatgttgtaaaccacgtactcacggctacggcattagatgagaaattattcctaattaagaaaatggctgaacacgatgtttatggagttagcaatttcaaaatagggatgtttaacctgacatttattaagtcgttggatcataccgttttcccctctctgttagatgaggatagcaaaataaagttttttaaggggaaaaagctcaatattgtagcattacgatctctggaggattgtataaattacgtgactaaatccgagaatatgatagaaatgatgaaggaaagatcgactattttaaatagcatagatatagaaacggaatcggtagatcgtctaaaagaattgcttctaaaatgaaaaaaaacactgattcagaaatggatcaacgactcggatataagtttttggtgcctgatcctaaagccggagttttttatagaccgttacatttccaatatgtatcgtattctaattttatattgcatcgattgcatgaaatcttgaccgtcaagcggccactcttatcgtttaagaataatacagaacgaattatgatagaaattagcaatgttaaagtgactcctccagattactcacctataatcgcgagtattaaaggtaagagttatgacgcattagccacgttcactgtaaatatctttaaagaggtaatgaccaaagagggtatatccatcactaaaataagtagttatgagggaaaagattctcatttgataaaaattccgctactaataggatacgggaataaaaatccacttgatacagccaagtatcttgttcctaatgtcataggtggagtctttatcaataaacaatctgtcgaaaaagtaggaattaatctagtagaaaagattacaacatggccaaaatttagggttgttaagccaaactcattcactttctcgttttcctccgtatcccctcctaatgtattaccgacaagatatcgccattacaagatatctctggatatatcacaattggaagcgttgaatatatcatcgacaaagacatttataacggtcaatattgttttgctgtctcaatatttatctagagtgagtctagaattcattagacgtagtttatcatacgatatgcctccagaagttgtctatctagtaaacgcgataatagatagtgctaaacgaattactgaatctattactgactttaatattgatacatacattaatgacctggtggaagctgaacacattaaacaaaaatctcagttaacgattaacgagttcaaatatgaaatgctgcataactttttacctcatatgaactatacacccgatcaactaaagggattttatatgatatctttactaagaaagtttctctactgtatcttccacacttctagatatccagatagagattcgatggtttgtcatcgcatcctaacgtacggcaaatattttgagacgttggcacatgatgaattagagaattacataggcaacatccgaaacgatatcatgaacaatcacaagaacagaggcacttacgcggtaaacattcatgtactaacaactcccggacttaatcacgcgttttctagcttattgagtggaaagttcaaaaagtcagacggtagttatcgaacacatcctcactattcatggatgcagaatatttctattcctaggagtgttggattttatccggatcaagtaaagatttcaaagatgttttctgtcagaaaataccatccaagtcaatatctttacttttgttcatcagacgttccggaaagaggtcctcaggtaggtttagtatctcaattgtctgtcttgagttccattacaaatatactaacgtctgagtatttggatttggaaaagaaaatttgtgagtatatcagatcatattataaagatgatataagttactttgaaacaggatttccaatcactatagaaaatgctctagtcgcatctcttaatccaaatatgatatgtgattttgtaactgactttagacgtagaaaacggatgggattcttcggtaacttggaggtaggtattactttagttagggatcacatgaatgaaattcgcattaatattggagcgggaagattagtcagaccattcttggttgtggataacggagagctcatgatggatgtgtgtccggagttagaaagcagattagacgacatgacattctctgacattcagaaagagtttccgcatgtcatcgaaatggtagatatagaacaatttacttttagtaacgtatgtgaatcggttcaaaaatttagaatgatgtcaaaggatgaaagaaagcaatacgatttatgtgactttcctgccgaatttagagatggatatgtagcatcttcactagtgggaatcaatcacaattctggacccagagctattcttggatgtgctcaagctaaacaagctatctcttgtctgagttcggatatacgaaataaaatagacaatggaattcatttgatgtatccagagaggccaatcgtgattagtaaggctttagaaacttcaaagattgcggctaattgcttcggccaacatgttactatagcattaatgtcgtacaaaggtatcaatcaagaggatggaattatcatcaaaaaacaatttattcagagaggcggtctcgatatagttaccgcaaagaaacatcaagtagaaattccattggaaaactttaataacaaagaaagagataggtctaacgcctattcaaaattagaaagtaatggattagttagactgaatgctttcttggaatccggagacgctatggcacgaaatatctcatcaagaactcttgaagatgattttgctagagataatcagattagcttcgatgtttccgagaaatataccgatatgtacaaatctcgcgttgaacgagtacaagtagaacttactgacaaagttaaggtacgagtattaaccatgaaagaaagaagacccattctaggagacaaatttaccactagaacgagtcaaaagggaacagtcgcgtatgtcgcggatgaaacggaacttccatacgacgaaaatggtatcacaccagatgtcattattaattctacatccatcttctctagaaaaactatatctatgttgatagaagttattttaacagccgcatattctgctaagccgtacaacaataagggagaaaaccgacctgtctgttttcctagtagtaacgaaacatccatcgatacatatatgcaattcgctaaacaatgttatgagcattcaaatccgaaattgtccgatgaagaattatcggataaaatcttttgtgaaaagattctctatgatcctgaaacggataagccttatgcatccaaagtattttttggaccaatttattacttgcgtctgaggcatttaactcaggacaaggcaaccgttagatgtagaggtaaaaagacgaagctcattagacaggcgaatgagggacgaaaacgtggaggaggtatcaagttcggagaaatggagagagactgtttaatagcgcatggtgcagccaatactattacagaagttttgaaagattcggaagaagattatcaagatgtgtatgtttgtgaaaattgtggagacatagcagcacaaatcaagggtattaatacatgtcttagatgttcaaaacttaatctctctcctctcttaacaaaaattgataccacgcacgtatctaaagtatttcttactcaaatgaacgccagaggcgtaaaagtcaaattagatttcgaacgaaggcctccttcgttttataaaccattagataaagttgatctcaagccgtcttttctggtgtaatattctagtttggtagtagatacatatcaatatcatcaaattcgagatccgaattataaaatgggcgtggattgttaactatagaatcggacgtctgatattcgaaaatctgtggagtttcaggttttggtggaggtgtaactgctacttgggatactgaagtctgatattcagaaagctgtggatgttctggttcggcatccaccgatggtgtcacatcactaatcggttcggtaacgtctgtggatggaggtgctacttctacagaacctgtagcctcagttgtcaacggagatacatttttaatgcgagaaaatgtataatttggtaatggtttcttatgtggatctgaagaagaggtaagatatctactagaaagataccgatcacgttctagttctcttttgtagaacttaactttttctttctccgcatctagttgatattccaacctcttcacgttactacgttcagattccaattcacgttcgcatgggttacctccgcagtttttacgagcgatttcacgttcagccttcatgcgtctctccctctctctatcgagtttatcagagcagtctttctgaaggcgatcgaactccataaatttctccaacgctttgattgtttccatagatttccgaagttcagcttttaggactgtgattctttttctttcgaattcacagctggatgtacaaccgtttccattaccgccatctctaagtttcttttctagatcggcaacatttcatccccatgccttttacattcctcgagtctactgtcgtcgaaatatcgttccagctccttttcgacatcaataactttagcacgttgtctctcaagctctcttttgtagttatctgattccctggcacgtttaagatcttcatgcaattgagtcagctcttaacttcctctcttgcttcttcgtcatagtacgcgcaatcactgtgagatccattgttaccacgtctacactcggcgagctcgcgtttaagagattcaatttcccgtttgtattggtccatgtttccattgctaccaccattagatttacaggctgctagttgtcgttcgagatcagaaatacgggttttcttggaattgatttcgtcgatgtacttggcatcgaaacacttattaagttctttttccaattctacgattttatttctttcgcgagtcaattccctcctgtagtaactatctgttttgtcagattcacgctctctacgtagactttcttgcaagttactaatttgttccctagcacgtccgagtttagttttatatgctgaatagagttctgattcatcctttgagcagatctctagcgatcgtttaagattcctaattctagtctttagcctatttacctcctcagaagatgttccgttaccgttgcgtttacactcgttaagctgtctatcaagatccatgattctatctctaagacgttgcatctctctttccatatcagcattgctttcattattacgtctgcagtcactcaactgtctttcaatatctgagattctatctctaagacgtcgcatctctctctgtttcggcattggtttcattattacgtctacagtcgttcaactgtctttcaagatctgatattctagattggagtctgctaatctctgtagcattttcacggcattcactcagttgtctttcaagatctgaaattttagattggagtctgctaatctctgtaagatttcctcctccgctctcgatgcagtcggtcaacttattctctagttctctaatacgcgaacgcagtgcatcaacttcttgcgtgtcttcctggttgcgtgtacattcatcgagtctagattcgagatctctaacgcgtcgtcgttcttcctcaagttctctgcgtactacagaaagcgtgtccctatcttgttgatatttagcaatttctgattctagagtactgattttgcttacgtagttactaatatttgtcttggccttatcaagatcctccttgtatttgtcgcattccttgatatccctacgaagtctggacagttcccattcgacattacgacgtttatcgatttcagctcggagatcgtcatcgcgttgttttagccacatacgactgagttcaagttctcgttgacaagatccatctacttttccattcctaatagtatccagttccttttctagttctgaacgcatttctcgttccctatcaagcgattctctcaattctcggatagtcttcttatcaatttctaataaatctgaaccatcatctgtcccattttgaatatccctgtgttctttgatctcttttgtaagtcggtcgattctttcggttttataaacagaatccctttccaaagtcctaatcttactgagtttatcactaagttctgcattcaattcggtgagttttctcttggcttcttccaactctgttttaaactctccactatttccgcattcttcctcgcatttatctaaccattcaattagtttattaataactagttggtaatcagcgattcctatagccgttcttgtaattgtgggaacataattaggatcttctaatggattgtatggcttgatagcatcatctttatcattattagggggatggacaaccttaattggttggtcctcatctcctccagtagcgtgtggttcttcaataccagtgttagtaataggcttaggcaaatgcttgtcgtacgcgggcacttcctcatccatcaagtatttataatcgggttctacttcagaatattcttttctaagagacgcgacttcgggagttagtagaagaactctgtttctgtatctatcaacgctggaatcaatactcaagttaaggatagcgaatacctcatcgtcatcatccgtatcttctgaaacaccatcatatgacatttcatgaagtctaacgtattgataaatagaatcagatttagtattaaacagatccttaacctttttagtaaacgcatatgtatattttagatctccagatttcataatatgatcacatgccttaaatgtcagtgcttccatgatataatctggaacactaatgggtgacgaaaaagatacagcaccatatgctacgttgataaataaatctgaaccactaagtagataatgattaatgttaagaaagaggaaatattcagtgtataggtatgtcttggcgtcatatcttgtactaaacacgctaaacagtttgttaatgtgatcaatttccaatagattaattagagcagcgggaataccaacaaacatattaccacatccgtattttctatgaatatcacatatcatgttaaaaaatcttgatagaagagcgaatatctcgtctgacttaatgagtcgtagttcagcagcaacataagtcataactgtaaatagaacatactttcctgtagtgttgattctagactccacatcaacaccattattaaaaatagttttatatacatctttaatctgctctccgttaatcgtcgaacgttctagtatacggaaacactttgatttcttatctgtagttaatgacttagtgatatcacgaagaatattacgaattacatttcttgtttttcttgagagacctgattcagaactcaactcatcgttccatagtttttctacctcagtggcgaaatctttggagtgcttggtacatttttcaataaggttcgtgacctccatttattataaaaaatttattcaaaacttaactacaatcgggtaattataaaatcgtagatctcccatgtggcggaatactaccatctatcgcatgtggatggacagtaggtaatggccatgggaacagtaatgtttgcatatttatctttcttgccagtattactgcatattgtcccaatgtttcgatgtgatgttctaacctatcaactgccgctgtatcacaacaatagtgtccgatgaaattaagattatgatccaatgtgtttaatatatgattatcaagtcttatacgatccgcgtcttttttgacaggatcaggttcttctacaggaagaagtttcggcctcttatgatattcatgtctgggaaacggtggtctagggtgaggctccggtatcggagtgggttttggattataatcatcatcgtctatgacatcatcttcgacttcgatatttattttgctatcttgatgatgtcctgtatcagttgcattttcagcactcgactgaatattagcgcattcattgtctattattaccatatttctaaacccaaaatgtatgtgttgaacatcagtactatcgttgatgagtcttatagcatgaattcgcttatcgttatcgggtttatcttctgtcaccttagcaattccttttttattaaactctacataatcatatccatttctattgtttgttctaatataaacgagtatagcatcattgctaaatttttcaatagtatcaaaaacagaatatcctaaaccatataatatatattcaggaacactcaaactaaatgtccaggattctcctaaatacgtaaactttaatagtgcgaaatcattcaaaaatctaccacttatagatagatagtacataaatgcgtatagtagtctacctatctctttattatgaaaaccggcattacgatcatatatgtcgtgatatacctgtgatccgtttacgttaaaccataaatacatgggtgatcctataaacatgaatttatttctaattctcagagctatagttaattgaccgtgtaatatttgcttacatgcatacttgatacgcttattaataagatttttatcattgctcgttatttcagaatcgtatatataaggagtaccatcgtgattcttaccagatattatacaaaatactatatataaaatatattgaccaacgttagtaatcatataaatgtttaacgttttaaattttgtattcaatgatccattatcatacgctagcatggtcttatgatattcattctttaaaatataatattgtgttagccattgcattggggctcctaatggagattttttattctcatccattttaggataggctttcataaagtccctaataacttcgtgaataatgtttctatgttttctactgatgcatgtatttgcttcgatttttttatcccatgtttcatctatcatagatttaaacgcagtaatgctcgcaacattaacatcttgaaccgttggtacaattccgttccataaatttataatgttcgccatttatataactcattttttgaatatacttttaattaacaaaagagttaagttactcatatggacgccgtccagtctgaacatcaatctttttagccagagatatcatagccgctcttagagtttcagcgtgattttccaacctaaatagaacttcatcgttgcgtttacaacacttttctatttgttcaaactttgttgttacattagtaatctttttttccaaattagttagccgttgtttgagagtttcctcattgtcgtctccatcggctttaacaattgcttcgcgtttagcctctggctttttagcagcctttgtagaaaaaaattcagttgctggaattgcaagatcgtcatctccggggaaaagagttccgtccatttaaagtacagattttagaaactgacactctgcgttatttatatttggtacaacacatggattataaatattgatgttaataacatcagaaaatgtaaagtctatacattgttgcatcgtgttaaattttctaatggatctagtattattgggtccaacttctgcctgaaatccaaatatggaagcggatacaaaaccgtttcctggataaaccacacatctccacttttgctttacatcagaaattgtgtcgttgacatcttgaactctcctatctaatgccggtgttccacctatagattttgaatattcgaatgctgcatgagtagcattaaattccttaatattgccataattttcatatattgagtaaccctggataaaaagtaaacacaccgcagccgtcgctaccacaataaaaaaaattgatagagagttcatttataatctattagaagctgacaaaatttttttacacgcatcagacaatgctttaataaatagttcaacatctacttttgtcatatcgaaccgatggtatgattctaacctagaattacatccgaaaaagttgactatgttcatagtcattaagtcattaacaaacaacattccagactctggattataagacgatactgtttcgtcacaattacctaccttaatcatgtgattatgaatattggctattagagcaccttctaagaaatctataatatctttgaaacacgatttaaaatcaaaccacgaatatacttctacgaagaaagttagtttacccataggagaaataactataaatggagatctaaatacaaaatccggatctatgatagttttaacattattatattctctattaaatacctccacatctaaaaatgttaattttgaaactatgtcttcgtttattaccgtacctgaactaaacgctataagctctattgtttgagaactctttaaacgatattcttgaaatacatgtaacaaagtttcctttaactcggtcggtttatctaccatagttacagaatttgtatccttatctataatataataatcaaaatcgtataaagttatataattatcgcgttcagattgggatcttttcaaatagactaaaaaccccatttctctagtaagtatcttatgtatatgtttgtaaaatatcttcatggtgggaatatgctctaccgcagttagccattcctcattgacagcggtagatgtattagacaaaactattccaatgtttaacaagggccattttacgagattattaaatccttgtttgataaatgtagccaatgagggttcgagttcaacgacgattgaattctcttcccgcggatgctgcatgatgaacgacgggatgttgttcgattgatttggaattctttttcgactttttgtttatattaaatattttaaaatttatagcggatagcaattcatgtaccacggataatgtagacgcgtattgcgcatcgatatctttattattagataaatttatcaataaatgtgagaagtttgcctcgttaaggtcttccatttaaatattatataaacatttgtgtttgtaacttattcgtcttttatggaatagttttttactagtaaagctgcaattacacactttgtccgtaaaacataaatataaacaccagcttttatcaatcgttccaaaaagtcgacggcggacatttttaacatggcatctattttaaatacacttaggtttttggaaaaaacatcattttataattgtaacgattcaataactaaagaaaagattaagattaaacataagggaatgtcatttgtattttataagccaaagcattctaccgttgttaaatacttgtctggaggaggtatatatcatgatgatttggttgtattggggaaggtaacaattaataatctaaagatgatgctattttacatggatttatcatatcatggagtgacaagtagtggagcaatttacaaattgggatcgtctatcgatagactttctctaaataggactattgttacaaaagttaataattatgatgatacattttttgacgacgatgattgatcgctattgcacaattttgtttttgtactttctaatatagtgtttaggttctttttcatatgagaatattgatttactaaaatatctatgtttaacttttgttctatgacgtccttatcggcggtatcggtacatatacgtaattcaccttcacaaaatacggagtcttcgataataatagccaatcgattattggatctagctgtctgtatcatattcaacatgtttaatatatcctttcgtttcccctttacaggcatcgatcgtagcatattttccgcgtctgatatggaaatgttaaaactacaaaaatgcgtaatgttagcccgtcctaatattggtacgtgtctataagtttggcatagtagaataatagacgtgtttaaatgccttccaaagtttaagaattctattagagtattgcattttgatagtttatcgcctacatcatcaaaaataagtaaaaagtgtgctgattttttatgattttgtgcgacagcaatacatttttctatgttacttttagttcgtatcagattatattctagagattcctgactactaacgaaattaatatgatttggccaaatgtatccatcataatctgggttataaacgggtgtaaacaagaatatatgtttatattttttaactagtgtagaaaacagagatagtaaatagatagtttttccagatccagatcctcctgttaaaaccattctaaacggcatttttaataaattttctcttgaaaattgtttttcttggaaacaattcataattatatttacagttactaaattaatttgataataaatcaaaatatggaaaactaaggttgttagtagggaggagaacaaagaaggcacatcgtgatataaataacatttattatcatgatgacaccagaaaacgacgaagagcagacatctgtgttctccgctactgtttacggagacaaaattcagggaaagaataaacgcaaacgcgtgattggtctatgtattagaatatctatggttatttcactactatctatgattaccatgtccgcgtttctcatagtgcgcctaaatcaatgcatgtctgctaacgaggctgctattactgacgccgctgttgccgttgctgctgcatcatctactcatagaaaggttgcgtctagcactacgcaatatgatcacaaagaaagctgtaatggtttatattaccagggttcttgttatatattacattcagactaccagttattctcggatgctaaagcaaattgcactgcggaatcatcaacactacccaataaatccgatgtcttgactacctggctcattgattatgttgaggatacatggggatctgatggtaatccaattacaaaaactacatccgattatcaagattctgatgtatcacaagaagttagaaagtatttttgtgttaaaacaatgaactaatatttatttttgtacattaataaatgaaatcgcttaatagacaaactgtaagtaggtttaagaagttgtcggtgccggccgctataatgatgatactctcaaccattattagtggcataggaacatttctgcattacaaagaagaactgatgcctagtgcttgcgccaatggatggatacaatacgataaacattgttatttagatactaacattaaaatgtctacagataatgcggtttatcagtgtcgtaaattacgagctagattgcctagacctgatactagacatctgagagtattgtttagtattttttataaagattattgggtaagtttaaaaaagaccaatgataaatggttagatattaataatgataaagatatagatattagtaaattaacaaattttaaacaactaaacagtacgacggatgctgaagcgtgttatatatacaagtctggaaaactggttaaaacagtatgtaaaagtactcaatctgtactatgtgttaaaaaattctacaagtgacaacaaaaaatgaattaataataagtcgttaacgtacgccgccatggacgccgcgtttgttattactccaatgggtgtgttgactataacagatacattgtatgatgatctcgatatctcaatcatggactttataggaccatacattataggtaacataaaaactgtccaaatagatgtacgggatataaaatattccgacatgcaaaaatgctactttagctataagggtaaaatagttcctcaggattctaatgatttggctagattcaacatttatagcatttgtgccgcatacagatcaaaaaataccatcatcatagcatgcgactatgatatcatgttagatatagaagataaacatcagccattttatctattcccatctattgatgtttttaacgctacaatcatagaagcgtataacctgtatacagctggagattatcatctaatcatcaatccttcagataatctgaaaatgaaattgtcgtttaattcttcattctgcatatcagacggcaatggatggatcataattgatgggaaatgcaatagtaattttttatcataaaagttgtaaagtaaataataaaacaataaatattgaactagtagtacgtatattgagcaatcagaaatgatgctggtacctcttatcacggtgaccgtagttgcgggaacaatattagtatgttatatattatatatttgtaggaaaaagatacgtactgtctataatgacaataaaattatcatgacaaaattaaaaaagataaagagttctaattccagcaaatctagtaaatcaactgatagcgaatcagactgggaggatcactgtagtgctatggaacaaaacaatgacgtagataatatttctaggaatgagatattggacgatgatagcttcgctggtagtttaatatgggataacgaatccaatgttatggcgcctagcacagaacacatttacgatagtgttgctggaagcacgctgctaataaataatgatcgtaatgaacagactatttatcagaacactacagtagtaattaatgaaacggagactgttgaagtacttaatgaagataccaaacagaatcctaactattcatccaatcctttcgtaaattataataaaaccagtatttgtagcaagtcaaatccgtttattacagaacttaacaataaatttagtgagaataatccgtttagacgagcacatagcgatgattatcttaataagcaagaacaagatcatgaacacgatgatatagaatcatcggtcgtatcattggtgtgattagtttcctttttataaaattgaagtaatatttagtattattgctgccgtcacgttgtacaaatggagatattccctgtattcggcatttctaaaattagcaattttattgctaataatgactgtagatattatatagatacagaacatcaaaaaattatatctgatgagatcaatagacagatggatgaaacggtacttcttaccaacatcttaagcgtagaagttgtaaatgacaatgagatgtaccatcttattcctcatagattatcgacgattatactctgtattagttctgtcggaggatgtgttatctctatagataatgacgtcaatggcaaaaatattctaacctttcccattgatcatgctgtaatcatatccccactgagtaaatgtgtcgtagttagcaagggtcctacaaccatattggttgttaaagcggatatacctagcaaacgattggtaacatcgtttacaaacgacatactatatgtaaacaatctgtcactgattaattatttgccgttgtctgtattcattattagacgagtcaccgactatttggatagacacatatgcgatcagatatttgctaataataagtggtattcccttataaccatcgacgataagcaatatcctattccatcaaactgtataggtatgtcctctgccaagtacataaattctagcatcgagcaagatactttaatccatgtttgtaacctcgagcatccgttcgactcagtatacaaaaaaatgcagtcgtacaattctctacctatcaaggaacaaatattgtacggtagaattgataatataaatatgagcattagtatttctgtggattaatagatttctagtatggggatcattaatcatctctaatctctaaatacctcataaaacgaaaaaaaagctattatcaaatactgtacggaatggattcattctcttctctttttatgaaactctgttgtatatctactgataaaactggaagcaaaaaatctgatagaaagaataagaataagatcaaggattatatggaacacgattattataaaataacaatagttcctggttcctcttccacgtctactagctcgtggtattatacacatgcctagtaatagtctctttgcgttgacggaaagcagactagaaataacaggctaaaatgttcagacaccataatagttcccaacccagataataacagagttccatcaacacattcctttaaactcaatcccaaacccaaaaccgttaaaatgtatccggccaattgatagtagataatgaggtgtacagcgcatgataatttacacagtaaccaaaatgaaaacactttagtaattataagaaatatagacggtaatgtcatcatcaacaatccgataatatgcctgagagtaaacattgatggataaaacaaaaatgctccgcataactctatcatggcaataacacaaccaaacacttgtaaaattcctaaattagtagaaaatacaacgaatatcgatgtataagtgatctcgagaaataataagaataaagtaatgcccgtaaagataaacatcaacattgtttggtaatcattaaaccaattagtatgaagttgaactaatttcacagtagattttattccagtgttatcctcgcatgtataagtacctggtaagatatctttatattccataatcaatgagacatcactatctgataacgaatgaagtctagcactagtatgccatttacttaatattgtcgtcttggaagttttattataagttaaaatatcatggttatccaatttccatctaatatactttgtcggattatctatagtacacggaataatgatggtatcattacatgctgtatactctatggtctttgtagttgttataacaaccaacgtatagaggtatatcaacgatattctaactcttgacattttttatttatttaaaatgatacctttgttatttattttattctattttgctaacggtattgaatggcataagtttgaaacgagtgaagaaataatttctacttacttattagacgacgtattatacacgggtgttaatggggcggtatacacattttcaaataataaactaaacaaaactggtttaactaataataattatataacaacatctataaaagtagaggatgcggataaggatacattagtatgcggaaccaataacggaaatcccaaatgttggaaaatagacggttcagacgacccaaaacatagaggtagaggatacgctccttatcaaaatagcaaagtaacgataatcagtcacaacggatgtgtactatctgacataaacatatcaaaagaaggaattaaacgatggagaagatttgacggaccatgtggttatgatttattcacggcggataacgtaattccaaaagatggtttacgaggagcattcgtcgataaagacggtacttatgacaaagtttacattcttttcactgatactatcggctcaaagagaattgtcaaaattccgtatatagcacaaatgtgcctaaacgacgaaggtggtccatcatcattgtctagtcatagatggtcgacgtttctcaaagtcgaattagaatgtgatatcgacggaagaagttatagacaaattattcattctagaactataaaaacagataatgatacgatactatatgtattcttcgatagtccttattccaagtccgcattatgtacctattctatgaataccattaaacaatctttttctacgtcaaaattggaaggatatacaaagcaattgccgtctccagctcctggtatatgtttaccagctggaaaagttgttccacataccacgtttgaagtcatagaacaatataatgtactagatgatattataaagcctttatctaaccaacctatcttcgaaggaccgtctggtgttaaatggttcgatataaaggagaaggaaaatgaacatcgggaatatagaatatacttcataaaagaaaattctatatattcgttcgatacaaaatctaaacaaactcgtagctcgcaagtcgatgcgcgactattttcagtaatggtaactgcgaaaccgttatttatagcagatatagggataggagtaggaatgccacaaatgaaaaaaatacttaaaatgtaatcttaatcgagtacaccacacgacaatgaacaaacataagacagattatgctggttatgcttgctgcgtaatatgcggtctaattgtcggaattatttttacagcgacactattaaaagttgtagaacgtaaattagttcatacaccattaatagataaaacgataaaagatgcatatattagagaagattgtcctactgactggataagctataataataaatgtatccatttatctactgatcgaaaaacctgggaggaaggacgtaatgcatgcaaagctctaaattcaaattcggatctaattaagatagagactccaaacgagttaagttttttaagaagccttagacgaggctattgggtaggagaatccgaaatattaaaccagacaaccccatataattttatagctaagaatgccacgaagaatggaactaaaaaacggaaatatatttgtagcacaacgaatactcccaaactgcattcgtgttacactatataacaattacactacatttttatcataccactacttcggttagatgttttagaaaaaaataaatatcgccgtaccgttcttgtttttataaaaataacaattaacaattatcaaattttttctttaatattttacgtggttgaccattcttggtggtaaaataatctcttagtgttggaatggaatgctgtttaatgtttccacactcatcgtatattttgacgtatgtagtcacatcgtttacgcaatagtcagactgtagttctatcatgcttcctacatcagaaggaggaacagttttaaagtctcttggttttaatctattaccgttagttttcatgaaatcctttgttttatccacttcacattttaaataaatgtccactatacattcttttgttaattttactagatcgtcatgggtcatagaatttataggttccgtagtccatggatccaaactagcaaacttcgcgtatacggtatcgcgattagtgtatacaccaactgtatgaaaattaagaaaacagtttaataaatcaacagaaatatttaatcctccgtttgatacagatgcgccatatttatggatttcggattcacacgttgtttgtctgaggtgttcgtctagtgttgcttctacgtaaacttcgattcccatatattctttattgtcagaatcgcataccgatttatcatcatacactgtttgaaaactaaatggtatacacatcaaaataataaataataacgagtacattctgcaatattgttatcgtaattggaaaaatagtgttcgagtgagttggattatgtgagtattggattgtatattttattttatattttgtaataagaataaaatgctaatgtcaagtttattccaatagatgtcttattaaaaacatatataataaataacaatggctgaatggcataaaattatcgaggatatctcaaaaaataataagttcgaggatgccgccatcgttgattacaagactacaaagaatgttctagctgctattcctaacagaacatttgccaagattaatccgggtgaaattattcctctcatcactaatcgtaatattctaaaacctcttattggtcagaaatattgtattgtatatactaactctctaatggatgagaacacgtatgctatggagttgcttactgggtacgcccctgtatctccgatcgttatagcgagaactcataccgcacttatatttttgatgggtaagccaacaacatccagacgtgacgtgtatagaacgtgtagagatcacgctacccgtgtacgtgcaactggtaattaaaataaaaagtaatattcatatgtagtgtcaattttaaatgatgatgatgaaatggataatatccatattgacgatgtcaataatgccggtattggcatacagttcatcgatttttagatttcattcagaggatgtggaattatgttatgggcatttgtattttgataggatctataatgtagtaaatataaaatataatccgcatattccatatagatataattttattaatcgcacgttaaccgtagatgaactagacgataatgtcttttttacacatggttattttttaaaacacaaatatggttcacttaatcctagtttgattgtctcattatcaggaaacttaaaatataatgatatacaatgctcagtaaatgtatcgtgtctcattaaaaatttggcaacgagtacatctactatattaacatctaaacataagacttattctctacatcggtccacgtgtattactataataggatacgattctattatatggtataaagatataaatgacaagtataatgacatctatgattttactgcaatatgtatgctaatagcgtctacattgatagtgaccatatacgtgtttaaaaaaataaaaatgaactcttaattatgctatgctattagaaatggataaaatcaaaattacggttgattcaaaaattggtaatgttgttaccatatcgtataacttggaaaagataactattgatgtcacacctaaaaagaaaaaagaaaaggatgtattattagcgcaatcagttgctgtcgaagaggcaaaagatgtcaaggtagaagaaaaaaatattatcgatattgaagatgacgatgatatggatgtagaaagcgcgtaatacgatctataaaaataagtatataaatactttttatttactgtactcttactgtgtagtggtgataccctactcgattatttttttaaaaaaaaaatacttattctgattcttctagccatttccgtgttcgtttgaatgccacatcgacgtcaaagataggggagtagttgaaatctagttctgcattgttggtacgcacctcaaatgtagtgttggatatcttcaacgtatagttgttgagtagtgatggttttctaaatagaattctcttcatatcattcttgcacgcgtacatttttagcatccatcttggaatcctagatccttgttctattcccaatggtttcatcaatagaagattaaacatatcgtacgaacacgatggagagtaatcgtagcaaaagtaagcatttcctttaatctcagatcccggatactggatatattttgcagccaacacgtgcatccatgcaacatttcctacatatacccggctatgcaccgcgtcatcatcgactgtacgatacataatgttaccgtgttgcttacattgctcgtaaaagactttcatcaatttgtctccttctccgtaaattccagtgggtcttaggcaacaagtatacaattttgctccattcatgattacggaattattggctttcataaccagttgctcggccatacgtttactttttgcgtatacatgtcctggtgatatatcataaagggtatgctcatggccgatgaatggatcaccgtgtttattgggtcctattgcttccatgctactagtatagatcaaatacttgattcctaggtccacacaagctgccaaaatagtctgtgttccataatagtttactttcatgatttcattatcggtgtattttccaaatacatccactagagcagccgtatgaataatcagatttaccccatctagcgcttctctcaccttatcaaagtcgtttatatcacattgtatatagtttataaccttaactttcgaggttattggttgtggatcttctacaatatctatgactctgatttcttgaacatcatctgcactaattaacagttttactatatacctgcctagaaatccggcaccaccagtaaccgcgtacacggccattgctgccactcataatatcagactacttattctattttactaaataatggctgtttgtataatagaccacgataatatcagaggagttatttactttgaaccagtccatggaaaagataaagttttaggatcagttattggattaaaatccggaacgtatagtttgataattcatcgttacggagatattagtcaaggatgtgattccataggcagtccagaaatatttatcggtaacatctttgtaaacagatatggtgtagcatatgtttatttagatacagatgtaaatatatttacaattattggaaaggcgttatctatttcaaaaaatgatcagagattagcgtgtggagttattggtatttcttacataaatgaaaagataatacattttcttacaattaacgagaatggcgtttgatatatcagttaatgcgtctaaaacaataaatgcattagtttacttttctactcagcaaaataaattagtcatacgtaatgaagttaatgatacacactacactgtcgaatttgatagggacaaagtagttgacacgtttatttcatataatagacataatgacaccatagaaataagaggggtgcttccagaggaaactaatattggttgcgcggttaatacgccggttagtatgacttacttgtataataagtatagttttaaactgattttagcagaatatataagacacagaaatactatatccggcaatatttattcggcattgatgacactagatgatttggctattaaacagtatggagacattgatctattatttaatgagaaacttaaagtagactccgattcgggactatttgactttgtcaactttgtaaaggatatgatatgttgtgattctagaatagtagtagctctatctagtctagtatctaaacattgggaattgacaaataaaaaatataggtgtatggcattagccgaacatatatctgatagtattccaatatctgagctatctagactacgatacaatctatgtaagtatctacgcgggcacactgagagcatagaggatgaatttgattattttgaagacgatgattcgtctacatgttctgccgtaaccgacagggaaacggatgtataatttttttttatagcgtgaaggatatgataaaaaatataattgttgtatttatcccattccaatcaccttatatgattctgtaacacaataaaggagtcttatagatgtatagaggtcagatactggtttgataaactgtttattccacataagtatgtttgactttatggttagacccgcatactttaacaaatcactgaaaattggagttaggtattgacctctcagaatcagttgccgttctggaacattaaatgtattttttatgatatactccaacgcatttatgtgggcatacaacaagtcattactaatggagtattccaagagttttagttgtctagtatttaacaagagaagagatttcaacagactgtttatgaactcgaatgccgcctcattgtcgcttatattgatgatgtcgaattctcccaatatcatcaccgatgagtagctcatcttgttatcgggatccaagttttctaaagatgtcattaaaccctcgatcatgaatggatttatcatcatcgtttttatgttggacatgagcttagtccgtttgtccacatctatagacgacgatttctgaattatttcatatatccctctctttaactccaggaacttgtcaggatggtctactttaatatgttctcgtctaagagatgaaaatctttggatggttgtacgcgacttttctctaaaggatgacgttgcccaagatcctctcttaaatgaatccatcttatccttggacaagatggacagtctattttccttagatggtttaatatttttgttacccatgatctataaaggtagacctaatcgtctcggatgacctatatatttattttcagttttattatacgcataaattgtaaaaaatatgttaggtttacaaaaatgtctcgtggggcattaatcgtttttgaaggattggacaaatctggaaaaacaacacaatgtatgaacatcatggaatctataccggcaaacacgataaaatatcttaactttcctcagagatccactgtcactggaaagatgatagatgactatctaactcgtaaaaaaacctataatgatcatatagttaatctattattttgtgcaaatagatgggagtttgcatcttttatacaagaacaactagaacagggaattactttaatagttgatagatacgcattttctggagtagcgtatgccgccgctaaaggcgcgtcaatgactctcagtaagagttatgaatctggattgcctaaacccgacttagttatattcttggaatctggtagcaaagaaattaatagaaacgtcggcgaggaaatttatgaagatgttacattccaacaaaaggtattacaagaatataaaaaaatgattgaagaaggagatattcattggcaaattatttcttctgaattcgaggaagatgtaaagaaggagttgattaagaatatagttatagaggctatacacacggttactggaccagtggggcaactgtggatgtaatagtgaaattacattttttataaatagatgttagtacagtgttataaatggatgaagcatattactctggcaacttggaatcagtactcggatacgtgtccgatatgcataccgaactcgcatcaatatctcaattagttattgccaagatagaaactatagataatgatatattaaacaaggacattgtaaattttatcatgtgtagatcaaacttggataatccatttatctctttcctagatactgtatatactattatagatcaagagaactatcagactgagttgattaattcattagacgacaatgaaattatcgattgtatagttaataagtttatgagcttttataaggataacctagaaaatatagtagatgctatcattactctaaaatatataatgaataatccagattttaaaactacgtatgcagaagtactcggttccagaatagccgatatagatattaaacaagtgatacgtaagaatatactacaattgtctaatgatatccgcgaacgatatttgtgaaaatattaaaaaaaaatactttttttattaaatgacgtcgcttcgcgaatttagaaaattatgctgtgatatatatcacgcatcaggatataaagaaaaatctaaattaattagagactttataacagatagggatgataaatatttgatcattaagctattgcttcccggattagacgatagaatttataacatgaacgataaacaaattataaaattatatagtataatatttaaacaatctcaggaagatatgctacaagatttaggatacggatatataggagacactattaggactttcttcaaagagaacacagaaatccgtccacgagataaaagcattttaactttagaagaagtggatagttttttaactacgttatcatccgtaactaaagaatcgcatcaaataaaattattgactgatatcgcatccgtttgtacatgtaatgatttaaaatgtgtagtcatgcttattgataaagatctaaaaattaaagcgggtcctcggtacgtacttaacgctattagtcctaatgcctatgatgtgtttagaaaatctaataacttgaaagagataatagaaaatgcatctaaacaaaatctagactctatatctatttctgttatgactccaattaatcccatgttagcggaatcgtgtgattctgtcaataaggcgtttaaaaaatttccatcaggaatgtttgcggaagtcaaatacgatggtgaaagagtacaagttcataaaaataataacgagtttgccttctttagtagaaacatgaaaccagtactctctcataaagtggattatctcaaagaatacataccgaaagcatttaaaaaagctacgtctatcgtattggattctgaaattgttcttgtagacgaacataatgtaccgctcccgtttggaagtttaggaatacacaaaaagaaagaatataaaaactctaacatgtgtttgttcgtgtttgactgtttgtactttgatggattcgatatgacggacattccattgtacgaacgaagatcttttctcaaagatgttatggttgaaatacccaatagaatagtattctcagagttgacgaatattagtaacgagtctcagttaactgacgtattggatgatgcactaacgagaaaattagaaggattggtcttaaaagatattaatggagtatacgaaccgggaaagagaagatggttaaaaataaagcgagactatttgaacgagggttccatggcagattctgccgatttagtagtactaggtgcttactatggtaaaggagcaaagggtggtatcatggcagtctttctaatgggttgttacgacgatgaatccggtaaatggaagacggttaccaagtgttcaggacacgatgataatacgttaagggagttgcaagaccaattaaagatgattaaaattaacaaggatcccaaaaaaattccagagtggttagtagttaataaaatctatattcccgattttgtagtagaggatccgaaacaatctcagatatgggaaatttcaggagcagagtttacatcttccaagtcccataccgcaaatggaatatccattagatttcctagatttactaggataagagaggataaaacgtggaaagaatctactcatctaaacgatttagtaaacttgactaaatcttaatagttacatacaaactgaaaattaaaataacactatttagttggtggtcgccatggatggtgttattgtatactgtctaaacgcgctagtaaaacatggcgaggaaataaatcatataaaaaatgatttcatgattaaaccatgttgtgaaagagtttgtgaaaaagtcaagaacgttcacattggcggacaatctaaaaacaatacagtgattgcagatttgccatatctggataatgcggtatccgatgtatgcaattcactgtataaaaagaatgtatcaagaatatccagatttgctaatttgataaagatagatgacgatgacaagactcctactggtgtatataattattttaaacctaaagatgccattcctgttattatatccataggaaaggatagagatgtttgtgaactattaatctcatcagacatatcgtgtgcatgcgtggagttaaattcatatcacgtagccattcttcccatggatgtttccttttttaccaaaggaaatgcatcattgattattctcctgtttgatttctctatcgatgcggcacctctcttaagaagtgtaaccgataataatgttattatatctagacaccagcgtatacatgacgagcttccgagttccaattggttcaagttttacataagtataaagtccgactattgttctatattatatatggttgttgatggatctgtgatgcatgcgatagctgataatagaactcacgcaattattagcaaaaatatattagacaatactacgattaacgatgagtgtagatgctgttattttgaaccacagattaggattcttgatagagatgagatgctcaatggatcatcgtgtgatatgaacagacattgtattatgatgaatttacctgatgtaggcgaatttggatctagtatgttggggaaatatgaacctgacatgattaagattgctctttcggtggctggtaatttaataagaaatcgagactacattcccgggagacgaggatatagctactacgtttacggtatagcctctagataatttttttaagcacgaaataaaaaacataattttaaaccaatctatttcatactattttgtgtgatcaccatggacataaagatagatattagtatttctggtgataaatttacggtgactactaggagggaaaatgaagaaagaaaaaaatatctacctctccaaaaagaaaaaactactgatgttatcaaacctgattatcttgagtacgatgacttgttagatagagatgagatgtttactattctagaggaatattttatgtacagaggtctattaggcctcagaataaaatatggacgactctttaacgaaattagaaaattcgacaatgatgcggaagaacaattcggtactatagaagaactcaagcagaaacttagattaaattctgaagagggagcagataactttatagattatataaaggtacaaaaacaggatatcgtcaaacttactgtatacgattgcatatctatgataggattgtgtgcatgcgtggtagatgtttggagaaatgagaaactgttttctagatggaaatattgtttacgagcgattaaactgtttattgatgatcacatgcttgataagataaaatctatactgcagaatagactagtatatgtggaaatgtcatagaaagttaaaagttaatgagagcaaaaatatataaggttgtattccatatttgttatttttttctgtaatagttagaaaaatacattcgatggtctatctatcagattattatgtgttataaggtactttttctcataataaactagagtatgagtaagatagtgtttttcaaaacatataaatctaaaattgatggatgagatatacagctattaatttcgaaaatatattttaatctgataactttaaacatggatttttgatggtggtttaacgttttaaaaaaagattttgttattgtagtatatgataatattaaaagatggatataaagaatttgctgactgcatgtactattttttacattactacattggctacggcagatatacctacttcgtcactgccacacgctccggtaaacggggcatgtgacgagggagaatatcttgataagaggcataatcaatgttgtaatcagtgtccacctggagaatttgccaaggtcagatgtagtggtagtgataacacaaaatgtgaacgctgcccacctcatacatataccgcaatccccaattactctaatggatgtcatcaatgtagaaaatgcccaacaggatcatttgataaggtaaagtgtaccggaacacagaacagtaaatgttcgtgtcttcctggttggtattgcgctactgattcttcacagactgaagattgtcgagattgtataccaaaaaggagatgtccatgcggatactttggtggaatagatgaacaaggaaatcctatttgtaaatcgtgttgtgttggtgaatattgcgactacctacgtaattatagacttgatccatttcctccatgcaaactatctaaatgtaattaattatgattttgatgataatgttaccatacattatatcgctacttggttagtgtattattcagtatgaagacctattaataattacttatcttttgacgatcttgttataattataatataaaaatacttatggcatagtaactcataattgctgacgcgataaattcgtaataatctgttttgttcaaaggaatctacaggcataaaaataaaaatataatttataatatactcttacagcgcgccatcatgaataacagcagtaaattaattgctgttattaatggatttagaaatagtggacgattttgtgatattaatatagttattaatgatgaaaggataaacgctcacagactcatcctatctggagcctccgaatatttttccattctgttttccaataattttatcgattctaatgaatacgaagttaatctaagtcatttagattatcaaagcgtaaacgatttgatcgattacatttatgggatacctttgagcctaactaacgataacgtgaaatatattctttcaaccgctgattttttacaaattggatctgctattacggagtgtgaaaattacatacttaaaaatctttgttctagaaactgtatcgatttctacatatacgctgataaatataataacaagaaaatagaatcagcgtcgtttaacacaatattacaaaatattttgagactcatcaacgatgaaaactttaaatacttaacagaggaatcaatgataaaaattttaagcgatgatatgttaaatataaaaaatgaggatttcgccccactaattctcattaaatggttagagagtactcaacaaccatgcaccgtcgagttacttaaatgcctcagaatatcattgctttccccacaagttataaaatcactttatagtcatcgactggttagttcaatctacgaatgtataacattcttaaacaatatagcattcttggatgaatcatttcctagataccatagcatcgagttgatatctatcggtataagtaattcgcatgataagatttccataaactgctacaatcataaaaaaaatacatgggaaatgatatcttcacgtagatataggtgtagtttcgcagtggccgtcctggataatattatttatatgatgggtggatatgatcagtccccgtatagaagttcaaaggttatagcgtacaatacatgtacaaattcttggatatatgatataccagagctaaaatatcctcgttctaattgtgggggactggctgatgacgaatacatttattgtataggcggcatacgcgatcaggattcatcgttgacatctagtattgatagatggaagccatcaaaaccatattggcagaagtatgctaaaatgcgcgaaccaaaatgtgatatgggggttgcgatgttaaacggattaatatatgttataggtggaatcgttaaaggtgacacgtgtaccgacgcactagagagtttatcagaagatggatggatgaagcatcaacgtcttccaataaaaatgtccaatatgtcgacgattgttcatgatggcaagatttatatatctggaggttacaacaatagtagtgtagttaatgtaatatcgaatttagtccttagctataattcgatatatgatgaatggaccaaattatcatcattaaacattcctagaattaatcccgctctatggtcagcgcataataaattatatgtaggaggaggaatatctgatgatgttcgaactaatacatctgaaacatacgacaaagaaaaagattgttggacattggataatggtcacgtgttaccacgcaattatataatgtataaatgcgaaccgattaaacataaatatccattggaaaaaacacagtacacgaatgattttctaaagtatttggaaagttttataggtagttgatagaacaaaatacataattttgtaaaaataaatcactttttatactaatatgacacgattaccaatacttttgttactaatatcattagtatacgctacaccttttcctcagacatctaaaaaaataggtgatgatgcaactctatcatgtaatcgaaataatacaaatgactacgttgttatgagtgcttggtataaggagcccaattccattattcttttagctgctaaaagcgacgtcttgtattttgataattataccaaggataaaatatcttacgactctccatacgatgatctagttacaactatcacaattaaatcattgactgctagagatgccggtacttatgtatgtgcattctttatgacatcgcctacaaatgacactgataaagtagattatgaagaatactccacagagttgattgtaaatacagatagtgaatcgactatagacataatactatctggatctacacattcaccggaaactagttctgagaaacctgattatatagataattctaattgctcgtcggtattcgaaatcgcgactccggaaccaattactgataatgtagaagatcatacagacaccgtcacatacactagtgatagcattaatacagtaagtgcatcatctggagaatccacaacagacgagactccggaaccaattactgataaagaagatcatacagttacagacactgtctcatacactacagtaagtacatcatctggaattgtcactactaaatcaaccaccgatgatacgtacaatgataatgatacagtaccaccaactactgtaggcggtagtacaacctctattagcaattataaaaccaaggactttgtagaaatatttggtattaccgcattaattatattgtcggccgtggcaatattctgtattacgtattatatatgtaataaacgttcacgtaaatacaaaacagagaacaaagtctagatttttgacttacataaatgtctgggatagtaaaatctatcatattgagcgggccatctggtttaggaaagacagccatagccaaaagactatgggaatatatttggatttgtggtgtcccataccactagatttcctcgtcctatggaacgagaaggtgtcgattaccattacgttaacagagaggccatctggaagggaatagccgccggaaactttctagaacatactgagtttttaggaaatatttacggaacttctaaaactgctgtgaatacagcggctattaataatcgtatttgtgtgatggatctaaacatcgatggcgttagaagtcttaaaaatacgtacctaatgccttactcggtgtatataagacctacctctcttaaaatggttgagaccaagcttcgttgtagaaacactgaagcggatgatgagattcatcgtcgtgtgatgttggcaaaaactgacatggatgaggcaggtgaagccggtctattcgacactattatcattgaagatgatgtgaatttagcatatagtaagttaattcagatactacaggaccgtattagaatgtattttaacactaattagagacttaagacttaaaacttgataattaataatataactcgtttttatatgtggctatttcaacgtctaatgtattagttaaatattaaaacttaccacgtaaaacttaaaatttaaaatgatatttcattgacagatagatcacacattatgaactttcaaggacttgtgttaactgacaattgcaaaaatcaatgggtcgttggaccattaataggaaaaggtggatttggtagtatttatactactaatgacaataattatgtagtaaaaatagagcccaaagctaacggatcattatttaccgaacaggcattttatactagagtacttaaaccatccgttatcgaagaatggaaaaaatctcacaatataaagcacgtaggtcttatcacgtgcaaggcatttggtctatacaaatccattaatgtggaatatcgattcttggtaattaatagattaggtgcagatctagatgcggtgatcagagccaataataatagattaccaaaaaggtcggtgatgttgatcggaatcgaaatcttaaataccatacaatttatgcacgagcaaggatattctcacggagatattaaagcgagtaatatagtcttggatcaaatagataagaataaattatatctagtggattacggattggtttctaaattcatgtctaatggcgaacatgttccatttataagaaatccaaataaaatggataacggtactctagaatttacacctatagattcgcataaaggatacgttgtatctagacgtggagatctagaaacacttggatattgtatgattagatggttgggaggtatcttgccatggactaagatatctgaaacaaagaattgtgcattagtaagtgccacaaaacagaaatatgttaacaatactgcgactttgttaatgaccagtttgcaatatgcacctagagaattgctgcaatatattaccatggtaaactctttgacatattttgaggaacccaattacgacaagtttcggcacatattaatgcagggtgtatattattaagtgtggtgtttggtcgataaaaattaaaaaataacttaatttattattgatctcgtgtgtacaaccgaaatcatggcgatgttttacgcacacgctctcggtgggtacgacgagaatcttcatgcctttcctggaatatcatcgactgttgccaatgatgtcaggaaatattctgttgtgttagtttataataacaagtatgacattgtaaaagacaaatatatgtggtgttacagtcaggtgaacaagagatatattggagcactgctgcctatgtttgagtgcaatgaatatctacaaattggagatccgatccatgatcaagaaggaaatcaaatctctatcatcacatatcgccacaaaaactactatgctctaagcggaatcgggtacgagagtctagacttgtgtttggaaggagtagggattcatcatcacgtacttgaaacaggaaacgctgtatatggaaaagttcaacatgattattctactatcaaagagaaggccaaagaaatgagtacacttagtccaggacctatcatcgattaccacgtctggataggagattgtatctgtcaagttactgctgtggacgtacatggaaaggaaattatgaaaatgagattcaaaaagggtgcggtgcttccgatcccaaatctggtaaaagttaaacttggggagaatgatacagaaaatctttcttctactatatcggcgacaccatcgaggtaaccacctctctggaagacagcgtgaataatgtactcatgaaacgtttggaaactatacgccatatgtggtctgttgtatatgatcattttgatattgtgaatggtaaagaatgctgttatgtgcatacgcatttgtctaatcaaaatcttataccgagtactgtaaaaacaaatttgtacatgaagactatgggatcatgcattcaaatggattccatggaagctctagagtatcttagcgaactgaaggaatcaggtggatggagtcccagaccagaaatgcaggaatttgaatatccagatggagtggaagacactgaatcaattgagagattggtagaggagttcttcaatagatcagaacttcaggctggtgaatcagtcaaatttggtaattctattaatgttaaacatacatctgtttcagctaagcaactaagaacacgtatacggcagcagcttccttctatactctcatcttttaccaacacaaagggtggatatttgttcattggagttgataataatacacacaaagtatttggattcacggtgggttacgactacctcagactgatagagaatgatatagaaaagcatatcaaaagactttgtgttgtgtatttctgtgagaagaaagaggacatcaagtacgcgtgtcgattcatcaaggtatataaacctggggatgaggctacctcgacatacgtgtgcgctatcaaagtggaaagatgctgttgtgctgtgtttgcagattggccagaatcatggtatatggatactaatggtatcaagaagtattctccagatgaatgggtgtcacatataaaattttaattaatgtaatagagaacaaataataaggttgtaatatcatatagacaataactaacaattaattagtaactgttatctcttttttaactaaccaactaactatatacctattaatacatcgtaattatagttcttaacatctattaatcattgattcgcttctttaattttttataaactaacattgttaattgaaaagggataacatgttacagaatataaattatatatggatttttttaaaaaggaaatacttgactggagtatatatttatctcttcattatatagcacgcgtgttttccaatttttccacatcccatataatacaggattataatctcgttcgaacatacgagaaagtggataaaacaatagttgattttttatctaggttgccaaatttattccatattttagaatatggggaaaatattctacatatttattctatggatgatgctaatacgaatattataattttttttctagatagagtattaaatattaataagaacgggtcatttatacacaatctcgggttatcatcatccattaatataaaagaatatgtatatcaattagttaataatgatcatccagataataggataagactaatgcttgaaaatggacgtagaacaagacattttttgtcctatatatcagatacagttaatatctatatatgtattttaataaatcatggattttatatagatgccgaagacagttacggttgtacattattacatagatgtatatatcactataagaaatcagaatcagaatcatacaatgaattaattaagatattgttaaataatggatcagatgtagataaaaaagatacgtacggaaacacaccttttatcctattatgtaaacacgatatcaacaacgtggaattgtttgagatatgtttagagaatgctaatatagactctgtagactttaatagatatacacctcttcattatgtctcatgtcgtaataaatatgattttgtaaagttattaatttctaaaggagcaaatgttaatgcgcgtaataaattcggaactactccattttattgtggaattatacacggtatctcgcttataaaactatatttggaatcagacacagagttagaaatagataatgaacatatagttcgtcatttaataatttttgatgctgttgaatctttagattatctattatccagaggagttattgatattaactatcgtactatatacaacgaaacatctatttacgacgctgtcagttataatgcgtataatacgttggtctatctattaaacaaaaatggtgattttgagacgattactactagtggatgtacatgtatttcggaagcagtcgcaaacaacaacaaaataataatggaagtactattgtctaaacgaccatctttgaaaattatgatacagtctatgatagcaattactaaacataaacagcataatgcagatttattgaaaatgtgtataaaatatactgcgtgtatgaccgattatgatactcttatagatgtacagtcgctacagcaatataaatggtatattttaagatgtttcgatgaaatagatatcatgaagagatgttatataaaaaataaaactgtattccaattagttttttgtatcaaagacattaatactttaatgagatacggtaaacatccttctttcgtgaaatgcactagtctcgacgtatacggaagtcgtgtacgtaatatcatagcatctattagatatcgtcagagattaattagtctattatccaagaagctggatcctggagataaatggtcgtgttttcctaacgaaataaaatataaaatattggaaaactttaacgataacgaactatccacatatctaaaaatcttataaacattattaaaatataaaatctaagtaggataaaatcacactacatcattgtttccttttagtgctcgacagtgtatactatttttaacgctcataaataaaaatgaaaacgatttccgttgttacgttgttatgcgtactacctgctgttgtttattcaacatgtactgtacccactatgaataacgctaaattaacgtctaccgaaacatcgtttaatgataaccagaaagttacgtttacatgtgatcagggatatcattctttggatccaaatgctgtctgtgaaacagataaatggaaatacgaaaatccatgcaaaaaaatgtgcacagtttctgattatgtctctgaactatataataaaccgctatacgaagtgaattccaccatgacactaagttgcaacggcgaaacaaaatattttcgttgcgaagaaaaaaatggaaatacttcttggaatgatactgttacgtgtcctaatgcggaatgtcaacctcttcaattagaacacggatcgtgtcaaccagttaaagaaaaatactcatttggggaatatatgactatcaactgtgatgttggatatgaggttattggtgcttcgtacataagttgtacagctaattcttggaatgttattccatcatgtcaacaaaaatgtgatatgccgtctctatctaacggattaatttccggatctacattttctatcggtggcgttatacatcttagttgtaaaagtggttttacactaacggggtctccatcatccacatgtatcgacggtaaatggaatcccatactcccaatatgtgtacgaactaacgaaaaatttgatccagtggatgatggtcccgacgatgagacagatttgagcaaactctcgaaagacgttgtacaatatgaacaagaaatagaatcgttagaagcaacttatcatataatcatagtggcgttgacaattatgggcgtcatatttttaatctccgttatagtattagtttgttcctgtgacaaaaataatgaccaatataagttccataaattgctaccgtaaatataaatccgttaaaataattaataatttaataacaaacaagtatcaaaagattaaagacttatagctagaatcaattgagatgtcttcttcagtggatgttgatatctacgatgccgttagagcatttttactcaggcactattataacaagagatttattgtgtatggaagaagtaacgccatattacataatatatacaggctatttacaagatgcgccgttataccgttcgatgatatagtacgtactatgccaaatgaatcacgtgttaaacaatgggtgatggatacacttaatggtataatgatgaatgaacgcgatattactgtaagcgttggcaccggaatactattcatggaaatgtttttcgattacaataaaaatagtatcaacaatcaactaatgtatgatataattaatagcgtatctataattctagctaatgagagatatagaagcgcttttaacgacgatggtatatacatccgtagaaatatgattaacaagttgtacggatacgcatctctaactactattggcacgatcgctggaggtgtttgttattatctgttgatgcatctagttagtttgtataaataattatttcaatatactagttaaaattttaagattttaaatgtataaaaaactaataacgtttttatttgtaataggtgcattagcatcctattcgaataatgagtacactccgtttaataaactgagtgtaaaactctatatagatggagtagataatatagaaaattcatatactgatgataataatgaattggtgttaaattttaaagagtacacaatttctattattacagagtcatgcgacgtcggatttgattccatagatatagatgttataaacgactataaaattattgatatgtataccattgactcgtctactattcaacgcagaggtcacacgtgtagaatatctaccaaattatcatgccattatgataagtacccttatattcacaaatatgatggtgatgagcgacaatattctattactgcagagggaaaatgctataaaggaataaaatatgaaataagtatgatcaacgatgatactctattgagaaaacatactcttaaaattggatctacttatatatttgatcgtcatggacatagtaatacatattattcaaaatatgatttttaaaaatttaaaatatattatcacttcagtgacagtagtcaaataacaaacaacaccatgagatatattataattctcgcagttttgttcattaatagtatacatgctaaaataactagttataagtttgaatccgtcaattttgattccaaaattgaatggactggggatggtctatacaatatatcccttaaaaattatggcatcaagacgtggcaaacaatgtatacaaatgtaccagaaggaacatacgacatatccgcatttccaaagaatgatttcgtatctttctgggttaaatttgaacaaggcgattataaagtggaagagtattgtacgggactatgcgtcgaagtaaaaattggaccaccgactgtaacattgactgaatacgacgaccatatcaatttgtacatcgagcatccgtatgctactagaggtagcaaaaagattcctatttacaaacgcggtgacatgtgtgatatctacttgttgtatacggctaacttcacattcggagattctaaagaaccagtaccatatgatatcgatgactacgattgcacgtctacaggttgcagcatagactttgtcacaacagaaaaagtgtgcgtgacagcacagggagccacagaagggtttctcgaaaaaattactccatggagttcgaaagtatgtctgacacctaaaaagagtgtatatacatgcgcaattagatccaaagaagatgttcccaatttcaaggacaaaatggccagagttatcaagagaaaatttaatacacagtctcaatcttatttaactaaatttctcggtagcacatcaaatgatgttaccacttttcttagcatgcttaacttgactaaatattcataactaatttttattaatgatacaaaaacgaaataaaactgcatattatacactggttaacgcccttataggctctaaccattttcaagatgaggtccctgattatagtccttctgttcccctctatcatctactccatgtctattagacgatgtgagaagactgaagaggaaacatggggattgaaaatagggttgtgtataattgccaaagatttctatcccgaaagaactgattgcagtgttcatctcccaactgcaagtgaaggattgataactgaaggcaatggattcagggatatacgaaacaccgataaattataaaaaaagcaatgtgtccgctgtttccgttaataatactattttcgtaactggcggattattcataaataactctaatagcacgatcgtggttaacaatatggaaaaacttgacatttataaagacaaacaatggtcgattatagaaatgcctatggctagggtatatcacggcatcgactcgacatttggaatgttatattttgccggaggtctatccgttaccgaacaatatggtaatttagagaaaaacaacgagatatcttgttacaatcctagaacgaataagtggtttgatatttcatatactatttataagatatccatatcatcattgtgtaaactaaataacgtcttctatgtatttagtaaggacattggatatgtggaaaagtatgatggtgcatggaagttagtacatgatcgtctccccgctataaaggcattatcaacttctccttattgattgaaaatgaaaatataaatagtttttatgtatagcagtattaccctatagttttattgcttactactaacatggatacagatgttacaaatgtagaagatatcataaatgaaatagatagagagaaagaagaaatactaaaaaatgtagaaattgaaaataataaaaacattaacaagaatcatccaagtggatatattagagaagcactcgttattaatactagtagtaatagtgattccattgataaagaagttatagaatgtatctgtcacgatgtaggaatatagatcatatctactaatttttataatcgatacaaaacataaaaaacaactcgttattacatagcaggcatggaatccttcaagtattgttttgataacgatggcaagaaatggattatcggaaatactttatattctggtaattcaatactctataaggtcagaaaaaatttcactagttcgttctacaattacgtaatgaagatagatcacaaatcacacaagccattgttgtctgaaatacgattctatatatctgtattggatcctttgactatcgacaactggacacgggaacgtggtataaagtatttggctattccagatctgtatggaattggagaaaccgatgattatatgttcttcgttataaagaattcgggaagagtattcgccccaaaggatactgaatcagtcttcgaagcatgcgtcactatgataaacacgttagagtttatacactctcaaggatttacccatggaaaaatagaaccgaggaatatactgattagaaataaacgtctttcactaattgactattctagaactaacaaactatacaagagtggaaactcacatatagattacaacgaggacatgataacttcaggaaatatcaattatatgtgtgtagacaatcatcttggagcaacagtttcaagacgaggagatttagaaatgttgggatattgcatgatagaatggttcggtggcaaacttccatggaaaaacgaaagtagtataaaagtaataaaacaaaaaaaagaatataaaaaatttatagctactttctttgaggactgttttcctgaaggaaatgaacctctggaattagttagatatatagaattagtatacacgttagattattctcaaactcctaattatgacagactacgtaaactgtttatacaagattgaaattatattcttttttttatagagtgtggtagtgttacggatatctaatattaatattagactatctctatcgcgctacacgaccaatatcgattactatggatatcttctatgaaaggagagaatgtatttatttctccagcgtcaatctcgtcagtattgacaatactgtattatggagctaatggatccactgctgaacagctatcaaaatatgtagaaacggaggagaacacggataaggttagcgctcagaatatctcattcaaatccatgaataaagtatatgggcgatattctgccgtgtttaaagattcctttttgagaaaaattggcgataagtttcaaactgttgacttcactgattgtcgcactatagatgcaatcaacaagtgtgtagatatctttactgaggggaaaatcaatccactattggatgaaccattgtctcctagcaattagtgccgtatactttaaagcaaaatggttgacgccattcgaaaaggaatttaccagtgattatcccttttacgtatctccgacggaaatggtagacgtaagtatgatgtctatgtacggcaaggcatttaatcacgcatctgtaaaagaatcattcggcaacttttcaatcatagaactgccatatgttggagatactagtatgatggtcattcttccagacaagattgatggattagaatccatagaacaaaatctaacagatacaaattttaagaaatggtgtgactttatggatgctatgtttatagatgttcacattcccaagtttaaggtaacaggctcgtataatctggtggatactctagtaaagtcaggactgacagaggtgttcggttcaactggagattatagcaatatgtgtaatttagatgtgagtgtcgacgctatgatccacaaaacgtatatagatgtcaatgaagagtatacagaagcagctgcagcaacttctgtactagtggcagactgtgcatcaacaattacaaatgagttctgtgcagatcatccgttcatctatgtgattaggcatgttgatggaaaaattcttttcgttggtagatattgctctccgacaactaattgttaaccattttttttaaaaaaaatagaaaaaacatgtggtattagtgcaggtcgttgttcttccaattgcaattggtaagatgacggccaactttagtacccacgtcttttcaccacagcactgtggatgtgacagactgaccagtattgatgacgtcaaacaatgtttgactgaatatatttattggtcgtcctatgcataccgcaacaggcaatgcgctggacaattgtattccacactcctctcttttagagatgatgcggaattagtgttcatcgacattcgcgagctggtaaaaaatatgccgtgggatgatgtcaaagattgtacagaaatcatccgttgttatataccggatgagcaaaaaaccatcagagagatttcggccatcatcggactttgtgcatatgctgctacttactggggaggtgaagaccatcccactagtaacagtctgaacgcattgtttgtgatgcttgagatgctaaattacgtggattataacatcatattccggcgtatgaattgatgagttgtacatcttgacattttctttcttctcttctccctttcttctcttctcccttcctccctcttctccctttcccagaaacaaacttttttacccactataaaataaaatgagtatactacctgttatatttctttctatatttttttattcttcattcgttcagacttttaacgcgtctgaatgtatcgacaaagggcaatattttgcatcattcatggagttagaaaacgagccagtaatcttaccatgtcctcaaataaatacgctatcatccggatataatatattagatattttatgggaaaaacgaggagcggataatgatagaattataccgatagataatggtagcaatatgctaattctgaacccgacacaatcagactctggtatttatatatgcattaccacgaacgaaacctactgtgacatgatgtcgttaaatttgacaatcgtgtctgtctcagaatcaaatatagattttatctcgtatccacaaatagtaaatgagagatctactggcgaaatggtatgtcccaatattaatgcatttattgctagtaacgtaaacgcagatattatatggagcggacatcgacgccttagaaataagagacttaaacaacggacacctggaattattaccatagaagatgttagaaaaaatgatgctggttattatacatgtgttttagaatatatatacggtggcaaaacatataacgtaaccagaattgtaaaattagaggtacgggataaaataataccttctactatgcaattaccagatggcattgtaacttcaataggtagtaatttgactattgcatcgttgagacctcccacaacggatgcagacgtcttttggataagtaatggtatgtattacgaagaagatgatggggacggaaacggtagaataagtgtagcaaataaaatctatatgaccgataagagacgtgttattacatcccggttaaacattaatcctgtcaaggaagaagatgctacaacgtttacgtgtatggcgtttactattcctagcatcagcaaaacagttactgttagtataacgtgaatgtatgttgttacatttccatgtcaattgagtttataagaatttttatacattatcttccaacaaacaattgacgaacgtattgctatgattaactcccacgatactatgcatattattaatcattaacttgcagactatacctagtgctattttgacatactcatgttcttgtgtaattgcggtatctatattattaaagtacgtaaatctagctatagttttattatttaattttagataatataccgtctccttatttttaaaaattgccacatcctttattaaatcatgaatgggaatttctatgtcatcgttagtatattgtgaacaacaagagcagatatctataggaaagggtggaatgcgatacattgatctatgtagttttaaaacacacgcgaactttgaagaatttatataaatcattccatcgatacatccttctatgttgagatgtatatatccaggaattcgtttattaatatcgggaaatgtataaactaaaacattgcccgaaagcggtgcctctatctgcgttatatccgttcttaacttacaaaatgtaaccaatacctttgcatgacttgttttgttcggcaacgttagtttaaacttgacgaatggattaattacaatagcatgatccgcgcatctattaagtttttttactttaacgcccttgtatgtttttacagagactttatctaaatttctagtgcttgtatgtgttataaatataacgggatatagaaccgaatcacctaccttagatacccaattacattttatcagatccagataataaacaaattttgtcgccctaactaattctatattgttatatattttacaattggttatgatatcatgtaataacttggagtctaacgcgcatcgtcgtacgtttatacaattgtgatttagtgtagtatatctacacatgtatttttccgcactatagtattctggactagtgataaaactatcgttatatctatcttcaatgaactcatcgagatattgctctctgtcatattcatacacctgcataaactttctagacatcttacaatccgtgttattttaggatcatatttacatatttacgggtatatcaaagatgttagattagttaatgggaatcgtctataataatgaatattaaacaattatatgaggacttttaccacaaagcatcataaaaatgagtcgtcgtctgatttatgttttaaatatcaaccgcaaatcaactcataaaatacaagagaatgaaatatatacatattttagtcattgcaatatagaccatacttctacagaacttgattttgtagttaaaaactatgatctaaacagacgacaacctgtaactgggtatactgcactacactgctatttgtataataattactttacaaacgatgtactgaagatattattaaatcatggagtggatgtaacgatgaaaaccagtagcggacgtatgcctgtttatatattgcttactagatgttgtaatatttcacatgatgtagtgatagatatgatagacaaagataaaaaccacttattacatagagactattccaacctattactagagtatataaaatctcgttacatgttattaaaggaagaggatatcgatgagaacatagtatccactttattagataagggaatcgatcctaactttaaacaagacggatatacagcgttacattattattatttgtgtctcgcacacgtttataaaccaggtgagtgtagaaaaccgataacgataaaaaaggccaagcgaattatttctttgtttatacaacatggagctaatctaaacgcgttagataattgtggtaatacaccattccatttgtatcttagtattgaaatgtgtaataatattcatatgactaaaatgctgttgacttttaatccgaatttcgaaatatgtaataatcatggattaacgcctatactatgttatataacttccgactacatacaacacgatattcttgttatgttaatacatcactatgaaacaaatgttggagaaatgccgatagatgagcgtcgtatgatcgtattcgagtttatcaaaacatattctacacgtccggcagattcgataacttatttgatgaataggtttaaaaatataaatatttatacccgctatgaaggaaagacattattacacgtagcatgtgaatataataatacacacgtaatagattatcttatacgtatcaacggagatataaatgcgttaaccgacaataacaaacacgctacacaactcattatagataacaaagaaaattccccatataccattaattgtttactgtatatacttagatatattgtagataagaatgtgataagatcgttggtggatcaacttccatctctacctatctttcgtcgcttatcatactagtcatatcctaaatgttgatcatattccaccaaatgattgtgaaagagattgagattaaatcgtctaacaaacaattagtttttatgacattaacatataataaataaattaatcattattgacttaacgatgacgaaagttatcatcatcttaggattcttgattattaatacaaattcattgtctatgaaatgtgaacaaggtgtctcatattataattcacaagaattaaagtgttgtaaactatgtaagccaggaacatattcagatcatcgatgtgataaatacagcgataccatttgtggacattgtccgagtgacacattcacgtcaatatataatcgttctccttggtgtcatagttgtagaggtccatgtggtactaatcgagtagaggtcacaccttgtacacctaccacaaatagaatctgtcattgtgactcgaatagttattgtctccttaaagcttctgatggtaactgtgttacatgtgctcctaaaacaaaatgtggtcgtgggtatggaaagaaaggagaagatgaaatgggtaataccatttgtaagaaatgtcggaagggtacttattcagatattgtatctgactctgatcaatgtaaaccaatgacaagataagacttactcgcatctactggatagacataaaatatcctcctcgtaataatgaaatataaatatacactaattattaatatcaataacaatcgagtattaatatataggtcatttttaaatcccttttgggttccgtcccaaacggcgtttcggtctgcgtcgccgccatggccatgccgagcctctccgcgtgctcctccatcgaggacgacttcaactatggcagctcggtggcgtctgccagcgtgcacatacgaatggcatttctaagaaaagtctacggtatcctttgtctacaatttcttttaacaacggcaacaactgcagtatttttatactttgactgcatgcggacatttatacaagggagtcctgttctaatattggcatcaatgttcggatctataggcttgattttcgcattgactttacacagacataaacatcccctgaatctgtacctgctttgtggatttacactgtcggaatctctaacgctggcctctgttgttactttctatgatgtgcatgtcgttatgcaagctttcatgctgactactgcagcgtttcttgctctgactacatatactctacaatcaaagagagatttcagtaaacttggagcaggattgtttgctgctttgtggattttaattttgtcaggactcttggggatatttgtgcaaaatgagacagtggagctggtcctgtctgcttttggggcccttgtattctgtggattcattatctatgacacgcactcactaatacataagctctcgcctgaagagtatgtgttagcctctatcaatctctacttggatatcatcaatctgttcttgcatctgttgcagcttttggaagtatctaataagaaataaagtttaaaatagaattaataaaaacatataggtcattttttaaacatggattggaaaccaaggtagttagttaatacacacaagatatatttttttcacatcatccacccatgggtaacaccaaggttgttagttaataatatacaagatattttttctcactctgatccatgtaaaccaaggacgagataagacactctcattcctcatccacaacccattaaaaaaatggaaattaaagccctctattagcataaacggctacaggtctaccatcaggttaaccttcgtctaccttcacaatggcctttccttgtgcccagttcagaccctgtcattgccacgctactaaggactccctgaataccgtggccgacgtcagacattgtctgactgaatacatcctgtgggtttctcatagatggacccatagagaaagcgctcatctgttctccgtgtggtctcggaacatattctcacaccgtctcttccgcagataaatgcgaacccgtacccagaaatacctttaactatatcgatgtggaaattaatctgtatcccgtcaacgacacatcgtgtactcggacgaccactaccggtctcagcgaatccatctcaacgtcggaactaactattactatgaatcataaagactgtaatcccgtctttcgtgatggatacttctccgttcttaataaggtagcgacttcaggtttctttacaggagaaaggtgtgcactctgaatttcgagattaaatgcaataacaaagattcttcctccaaacagttaacgaaagcaaagaatgatactatcatgccgcattcggagacagtaactctagtgggcgacatctatatactatatagtaataccaatactcaagactacgaaactgatacaatctcttatcatgtgggtaatgttctcgatgtcgatagccatatgcccggtagttgcgatatacataaactgatcactaattccaaacccacccactttttatagtaagtttttcacccataaataataaatacaataattaatttctcgtaaaagtagaaaatatattctaatttattgcacggtaaggaagtagaatcataaagaacagtactcaatcaatagcaattatgaaacaatatatcgtcctggcatgcatgtgcctggcggcagctgctatgcctgccagtcttcagcaatcatcctcatcctcctcctcgtgtacggaagaagaaaacaaacatcatatgggaatcgatgttattatcaaagtcacaaagcaagaccaaacaccgaccaatgataagatttgccaatccgtaacggaaattacagagtccgagtcagatccagatcccgaggtggaatcagaagatgattccacatcagtcgaggatgtagatcctcctaccacttattactccatcatcggtggaggtctgagaatgaactttggattcaccaaatgtcctcagattaaatccatctcagaatccgctgatggaaacacagtgaatgctagattgtccagcgtgtccccaggacaaggtaaggactcatgaagaagctcttgctatgatcaaagactgtgaggtgtctatcgacatcagatgtagcgaagaagagaaagacagcgacatccagtactcgggtctaacatctctcataagaaagtgagttacgaagatatcatcggttcaacgatcgtcgatacaaaatgtgtcaagaatctagagtttagcgttcgtatcggagacatgtgcaaggaatcatctgaacttgaggtcaaggatggattcaagtatgtcgacggatcggcatctgaaggtgcaaccgatgatacttcactcatcgattcaacaaaactcaaagcgtgtgtctgaatcgataactctattcatctgaaattggatgagtagggttaatcgaacgattcaggcacaccacgaattaaaaaagtgtaccggacactatattccggtttgcaaaacaaaaatgttcttaactacattcacaaaaagttacctctcgcgacttcttctttttctgtctcaatagtgtgatacgattatgacactattcctattcctattcctatttcctttcagagtatcacaaaaatattaaacctctttctgatggtctcataaaaaaagttttacaaaaatatttttattctctttctctctttgatggtctcataaaaaaagttttacaaaaatatttttattctctttctctctttgatggtctcataaaaaaagttttacaaaaatatttttattctctttctctctttgatggtctcataaaaaaagttttacaaaaatatttttattctctttctctctttgatggtctcataaaaaaagttttacaaaaatatttttattctctttctctctttgatggtctcataaaaaaagttttacaaaaatatttttattctctttctctctttgatggtctcataaaaaaagttttacaaaaatatttttattctctttctctctttgatggtctcataaaaaaagttttacaaaaatatttttattctctttctctctttgatggtctcataaaaaaagttttacaaaaatatttttattctctttctctctttgatggtctcataaaaaaagttttacaaaaatatttttattctctttctctctttgatggtctcataaaaaaa

SEQ ID NO: 201 - DNA, 197223 bp, Artificial Sequence
  GLV-0b348
atttaaaatataatattaatgtactaaaacttatatattattaatttatctaactaaagttagtaaattatatatataattttataattaatttaattttactaattttatttagtgtctagaaaaaaatgtgtgacccatgactgtaggaaactctagagtgtaagaaagatcgatcgctttatagagaccatcagaaagaggtttaatatttttgtgagaccatcgaagagagaaagagataaaacttttttacgactccatcagaaagaggtttaatatttttgtgagaccatcgaagagagaaagagataaaacttttttacgactccatcagaaagaggtttaatatttttgtgagaccatcgaaggagaaagagataaaacttttttacgactccatcagaaagaggtttaatatttttgtgagaccatcgaaggagaaagagataaaacttttttacgactccatcagaaagaggtttaatatttttgtgagaccatcgaagagagaaagagataaaacttttttacgactccatcagaaagaggtttaatatttttgtgagaccatcgaagagagaaagagataaaacttttttacgactccatcagaaagaggtttaatatttttgtgagaccatcgaaggagaaagagataaaacttttttacgactccatcagaaagaggtttaatatttttgtgagaccatcgaagagagaaagagataaaacttttttacgactccatcagaaagaggtttaatatttttgtgagaccatcgaagagagaaagagataaaacttttttacgactccatcagaaagaggtttaatatttttgtgagaccatcgaagagagaaagagataaaacttttttacgactccatcagaaagaggtttaatatttttgtgagaccatcgaagagagaaagagataaaacttttttacgactccatcagaaagaggtttaatatttttgtgagaccatcgaagagagaaagagataaaacttttttacgactccatcagaaagaggtttaatatttttgtgagaccatcgaagagagaaagagaaagagatagttgatctagatatttttcttagtacaaaagtcaatgttttaaaatatatggacaagaatttgtctgtataaaaacttgtgtgaaattttgtaccaaagaaaaaatgtgagcagtatcccctacatggattttactagatcatttatataccaaaaaatattatacgatctacgttttattatatgattttaacgtgtaaattataaacattattttatgatatacaattgtctggtaacctagatgggcataggggatgttgataagctcgacgagtatatgttgttggacgttattgtttaagaaatagttgatgcatcagaaagagaataaaaaatattttagtgagaccatcgaagagagaaagagataaaacttttttacgactccatcagaaagaggtttaatatttttgtgagaccatcgaagagagaaagagataaaacttttttacgactccatcagaaagaggtttaatatttttgtgagaccatcgaagagagaaagagataaaacttttttacgactccatcagaaagaggtttaatatttttgtgagaccatcgaagagagaaagagataaaacttttttacgactccatcagaaagaggtttaatatttttgtgagaccatcgaagagagaaagagataaaacttttttacgactccatcagaaagaggtttaatatttttgtgagaccatcgaagagagaaagagataaaacttttttacgactccatcagaaagaggtttaatatttttgtgagaccatcgaagagagaaagagataaaacttttttacgactccatcagaaagaggtttaatatttttgtgagaccatcgaagagagaaagagataaaacttttttacgactccatcagaaagaggtttaatatttttgtgagaccatcgaagagagaaagagataaaacttttttacgactccatcagaaagaggtttaatatttttgtgagaccatcgaagagagaaagagataaaacttttttacgactccatcagaaagaggtttaatatttttgtgagaccatcgaagagagaaagagataaaacttttttacgactccatcagaaagaggtttaatatttttgtgagaccatcgaagagagaaagagataaaacttttttacgactccatcagaaagaggtttaatatttttgtgagaccatcgaagagagaaagagataaaacttttttacgactccatcagaaagaggtttaatatttttgtgagaccatcgaagagagaaagagataaaacttttttacgactccatcagaaagaggtttaatatttttgtgagaccatcgaagagagaaagagataaaacttttttacgactccatcagaaagaggtttaatatttttgtgagaccatcgaagagagaaagagataaaacttttttacgactccatcagaaagaggtttaatatttttgtgagaccatcgaagagagaaagagataaaacttttttacgactccatcagaaagaggtttaatatttttgtgagaccatcgaagagagaaagagataaaacttttttacgactccatcagaaagaggtttaatatttttgtgagaccatcgaagagagaaagagaataaaaatattttatgactccattgaagagagaaagagaaaatgagaatgagaataaaaatattttagtgacaccatcagaaagaggtttaatatttttgtgagaccatcgaagagagaaagagaataaaaatattttatgactccattgaagagagaaagagaaaatgagaatgagaataaaaatattttagtgacaccatcagaaagaggtttaatattttttatgagaccatcaaagagagaaagagaataaaaatatttttgtaaaactttttttatgagaccatcaaagagagaaagagaataaaaatatttttgtaaaactttttttatgagaccatcaaagagagaaagagaataaaaatatttttgtaaaactttttttatgagaccatcaaagagagaaagagaataaaaatatttttgtaaaactttttttatgagaccatcaaagagagaaagagaataaaaatatttttgtaaaactttttttatgagaccatcaaagagagaaagagaataaaaatatttttgtaaaactttttttatgagaccatcaaagagagaaagagaataaaaatatttttgtaaaactttttttatgagaccatcaaagagagaaagagaataaaaatatttttgtaaaactttttttatgagaccatcagaaagaggtttaatatttttgtgataccctgaaaggaaataggaataggaataggaatagtgtcataatcgtatcacactattgagacagaaaaagaagaagtcgcgagaggtaactttttgtgaatgtagttaagaacatttttgttttgcaaaccggaatatagtgtccggtacacttttttaattcgtggtgtgcctgaatcgttcgattaaccctactcatccaatttcagatgaatagagttatcgattcagacacacgctttgagttttgttgaatcgatgagtgaagtatcatcggttgcaccttcagatgccgatccgtcgacatacttaaatccatccttgacctcaagttcagatgattccttgcacatgtctccgatacgaacgctaaactctagattcttgacacattttgtatcgacgatcgttgaaccgatgatatcttcgtaactcactttcttatgagagatgttagacccgagtactggatgggtcttgatgtcgctgtctttctcttcttcgctacatctgatgtcgatagacacctcacagtctttgatcatagccagagcttcttcatgagtgatcgcgggagagtccttaccttgtcctggggacacgctggacaatctagcattcactgtgtttccatcagcggattctgagatggatttaatctgaggacatttggtgaatccaaagttcattctcagacctccaccgatgatggagtaataagtggtaggaggatctacatcctcgactgatgtggaatcatcttctgattccacctcgggatctggatctgactcggactctgtaatttccgttacggattggcaaatcttatcattggtcggtgtttggtcttgctttgtgactttgataataacatcgattcccatatgatgtttgttttcttcttccgtacacgaggaggaggatgaggatgattgctgaagactggcaggcacatgcatgccaggacgatatattgtttcatgattgctattgattgagtactgttctttatgattctacttccttaccgtgcaataaattagaatatattttctacttttacgagaaattaattattgtatttattatttatgggtgaaaaacttactataaaaagcgggtgggtttggaattagtgatcagtttatgtatatcgcaactaccgggcatatggctatcgacatcgagaacattacccacatgataagagattgtatcagtttcgtagtcttgagtattggtattactatatagtatatagatgtcgacgctagatagacagtctccgaatgcggcatgataccgtcatcattctttgctttcgttaactgtttggaggaaaaatttttgttattgcatttaatctcgaaattcagagtgcacacctttctcctgtaaagaaacctgaagttgctaccttattaaggacggagaagtattcctcacgaaatacgggattacagtctttatgattcatagtaatagttagttccgacgttgagatggattcgctgagaccggtagtggtcgttaactggatacagattaatttccacatcgatatagttaaaggtattactgggtacgggttcgcatttatctgcggaagagacggtgtgagaatatgttccgagaccacacggagaacagatgacgtctccggatactccgtatcctattccacattttgtttgggaaacacatgccttgcatccggatgatcctttgagaagacaataatatccgggagagcattcacagattctattgtgagtcgtgttacacggtcgcgtcttccgttacaacttagacaagcgggtaaatgattattgcgagatgtgaaggtacccgaaccacacggcgtacattgtgtgttagtcttgctatcgcataatctggaagcgtatgttcccggacacaaattatggcgtttgtattcgttgtctttacactttccatcggatggtgcatgcggtgctatatctcttccgtttattattatacatgagagaaacaatatatacgagtataatacggacttcatgatttaataatgtagtaatcgtcgtcttgttcctgtttcctacttctccaatcatatagatattttctttctatcatggataatatttgtaatggttcttttcgtacaacatactgtttagatgatattgcgcataatttccggaggcaaatacgatagtctagattgaccgatggtagactctaatttattgagtgctttgtcgacgagtttacttttacgctccatcgatagatggcactgttctatgagatcgtcgtacatgggaaatgaaatgtgactgtctgaatgtatggctttaagatagctgtgataccgtatacaggtcggtgtcggagattcgaatctctttaaggcgacttatgtcacgatgatggaatctatcttatcgaatgatatatttttcataaatacacttttatagtcctcgtttaaacagaatttactatgtagttccgcgaatgactcgtcccttaataggcagtaggctattatcttctttacgtagtaatcgtcgtagggagagacatcttgtagaacaacgatttaatcataggtagagatactttcagtctgtggtggatgatgtcattcacaacatccgccttgtatatgatgtttctgttttcaaacaccaagtcgaataccgtctttagtcggaaggttgatgtcgtatccgatgtatgaggcaacattgttgttacaattttgaaaggcggtattatagtattcgtctttctgaatgtcgaacctatctagtagataccgtagtatattgagagtgtatccttgattatgttttatgaatagataaagtagatgttgtccttcttccttttgttcgtgccaattgagtaacattatgagaatatgacctgttgcacaatcgttccatgatgggtgtacaatcaagattattacgtatcctcgtatcggctcctcgagataaaagagcatacaccacacgaggactatgtttggtatactgttgaaggtaagtgtgtaaccgcgttaatgtttgctccataatctattatcgcgtagatgaatcgcttctcggctcgcatcttagtgtgacttaacttgtaataattgcttttgtagaacgtggatatgtgtttacagtagtaatgaagagaagtgagttcatcctcgtcggatcctttgtacagaacgtaatagtttaagctcccattgaatttatatctaagataacacagcaatagatcggatgatttactaaagtcatcaatggtgtccgttagtatatcaaagatcttgttatcgattgatagtggtgtcctttttcatccttgctatcaaagttacgcatgccgtggtgtaacaatatctttaatacagatggattaaatcgtgtattcatcgtatagcaatgtaatggagagttacctcgtttattcagatcgcagtgtttaataactagcttaaacagatgagacgatgtatccacatcaaagaacgtgaaatacatatgacagacattgttgacagaaacgtgaccttcattcttaccgtcgtccataaatacgttaggtatgtaccacatactgtcgcgaacgatgcgtacaatctcgtccatctcataatgatttactttttcataattaaagatgtgaaagaaaaacagaacaatatatttttttagtaatgtttatgcgagacatataaaataaactccgtgtttatgatcatttttaacagcaacacattcaatattgtattgttatttttatattatttacacaattaacaatatattattagtttatattactgaattaataatataaaattcccaatcttgtcataaacacacactgagaaacagcataaacacaaaatccatcaaaaatgtcgatgaaatatctgatgttgttgttcgctgctatgataatcagatcattcgccgatagtggtaacgctatcgaaacgacatcgccagaaattacaaacgctacaacagatattccagctatcagattatgcggtccagagggagatggatattgtttacacggtgactgtatccacgctagagatattgacggtatgtattgtagatgctctcatggttatacaggcattagatgtcagcatgtagtattagtagactatcaacgttcagaaaacccaaacactacaacgtcatatatcccatctcccggtattatgcttgtattagtaggcattattattattacgtgttgtctattatctgtttataggttcactcgacgaactaaactacctatacaagatatggttgtgccataatttttataaatttttttatgagtatttttacaaaaaaaatgtataaagtgtatgtcttatgtatatttataaaaatgctaagtatgcgatgtatctatgttatttgtatttatctaaacaatacctctacctctagatattatacaaaaattttttatttcggcatattaaagtaaaatctagttaccttgaaaatgaatacagtgggtggttccgtatcaccagtaagaacataatagtcgaatacagtatccgattgagattttgcatacaatactagtctagaaagaaatttgtaatcatcttctgtgacgggagtccatatatctgtatcatcgtctagtttatcagtgtcccatgctatattcctgttatcatcattagttaatgaaaataactctcgtgcttcagaaaagtcaaatattgtatccatacatacatctccaaaactatcgcttatacgtttatctttaacgatacctatacctagatggttatttactaacagacattttccagatctattgactataactcctatagtttccacatcaaccaagtaatgatcatctattgttatataacaataacataactcttttccatttttatcagtatgtatatctatatcaacgtcgtcgttgtagtgaatagtagtcattgatctattatatgaaacggatatgtctagaacggcaattgttttacgtccagttaacactttctttgatttaaagtctagagtctttgcaaacataatatccttatccgactttatatttcctgtagggtggtataattttattttgcctccacatatcggtgtttccaaatatattactagacaatattccatatagttattagttaagggtacccaattagaacacgtacgcttattatcatcatttggatcgtatttcataaaagttattgtactatcgatgtcaacacattctacattttttaatcgtctatatagtatttttctgatattttctataatatcagaattgtcttccatcggaagttgtatactatcggaatcagttacatgtttaaataattctctgatgtcattccttatacaatcaaattcattattaaacagtttaatagtctgtagacctttatcgtcgtaaatatccattgtcttattagttacgcttatttttatgtgttttacgttgctttattatattttataagaatgattgtttgacgaatcacgagaactattaagacacattattaggtatatattataaaaaagtttttgattacgatgttataagaggaaagaggacacattaacatcatacatcaattaactacattcttataacatcgtaatcaaaagaattgcaattttgatgtataacaactgtcaatgggttatggaattgtatattacatattatacggtatgttggtaacgacaaataccgatcggtaattgtctgccggtgtaatagaattatatatatctatctattacaccggctgagtatgcataataataagttgtggtagtatgatctccatatttataatttaggactttgtattcagtatttttggaatcataaaaaataaaaaaaagttttactaatttaaaatttaaaaagtatttacatttttttcactgtttagtcgcggatatggaattcgatcctgccaaaatcaatacatcatctatagatcatgtaacaatattacaatacatagatgaaccaaatgatataagactaacagtatgcattatccgaaatattaataacattacatattatatcaatatcacaaaaataaatacacatttggctaatcaatttcgggcttggaaaaaacgtatcgccggaagggactatatgactaacttatctagagatacaggaatacaacaatcaaaacttactgaaactatacgtaactgtcaaaaaaatagaaacatatatggtctatatatacactacaatttagttattaatgtggttattgattggataaccgatgtgattgttcaatcaatattaagagggttggtaaattggtacatagctaataatacctatacacccaataatacaacaaccatttctgagttggatatcatcaaaatactggataaatacgaggacgtgtatagagtaagtaaagaaaaagaatgtggaatttgctatgaagttgtttactcaaaacgatagatactttggtttattggattcgtgtactcatatattttgcataacatgcatcaatatatggcataaaacacgaagagaaaccggtgcgtcggataattgtcctatatgtcgtacccgttttagaaacataacaatgagcaagttctataagctagttaactaataaataaaaagtttaatttgttgacgacgtatgtcgttatttttctcgtatgaaagattaaattcaattcaattcgttgtttctaatataatctgccgtattggatggattctcaagacaattgcatttagattatattatcatgaataaaaatagtagcacgcactacttcagccaaatattcttttttgaaacgccatctatcgtagtgaggacacaagtgaacctataattatcaaatttattagtatcagtcacatgaaggactttctgtagagtgacgattctaccatctatggtactaacggtttcatcctccttgataccctcacccaaatgttctataaatttagcatcctcgtccgatctcatatcctttgccaaccaatacatgtagctaaaattaggcataaatttcacacatccagtgcaacgaaattctccagaagatgttacgatgtttaggttaggacatttgatttcgtcggcattaacatatgggtgaacacacccatacatgaaagcgatgagaaataggattctcatcttgccaaaatatcactagaaaaaatttatttatcaattttaaaggtataaaaaatacttattgttgctcgaatattttgtatttgatggtatacggaagattagaaatgtaggtattatcatcaactgattctatggttttatgtattctatcatgtttcactattgcgtcggaaataatatcatatgcttccacatatattttattttgttttaactcataatactcacgtaattctggattattggcatatctatgaataattttagctccatgatcagtaaatattaatgagaacatagtattaccacctaccattatttttttcatttcgttcaattcttgattgcaaagatctatataatcattatagcgttgacttatggactctggaatcttagacgatgtacagtcatctataatcatggcatatttaatacattgttttatagcatagtagttatctacgatgttagatatttctctcaatgaatcaatcacacaatctaatgtaggtttatgacataatagcattttcagcagttcaatgtttctagattcgttgatggcaatggctatacatgtatatccgttatttgatctaatgttgacatctgaaccggattctagcagtaaagatactagagattgtttattatatctaacagccttgtgaagaagtgtttctcctcgtttgtcaatcatgttaatgtctttaagataaggtaggcaaatgtttatagtactaagaattgggcaagcataagacatgtcacaaagaccctttttgtatgtataagtgtaaaaattataacattcatagttggatttacataggtgtccaatcgggatctctccatcatcgagataattgatggcatctcccttccttttttagtagatatttcatcgtgtaagaatcaatattaatatttctaaagtattcgtgtatagcctctttatttaccacagttccatattccactagagggatatcgccgaatgtcatatactcaattagtatatgttggaggacatccgagttcattgttttcaatatcaaaaagatggtttccttatcatttctccatagtggtacaatactacacattattccgtgcggctttccattttccaaaaacaatttgaccaaatctaaatctacatctttattgtatctataatcactatttagataatcagccataattactcgagtgcaacatgttagatcgtctatatatgaataagcagtgttatctattcctttcattaacaatttaacgatgtctatatctatatgagatgacttaatataatattgaagagctgtacaatagtttttatctatagaagacggcttgattccgtgattaattagacatttaacaacttccggacgcacatatgctctcgtatccgactttgaatacagatgagagatgatatacagatgcaatacggtaccgcaatttcgtagttgataatcatcatacgcgtatcagtactcgtcctcataaagaacactgcagccattttctatgaacaaatcaataattttaggaacaggatcattgtcattacataattttctataactgaacgatggttttcacatttaacactcaagtcaaatccatgttctaccaacacctttatcaagtcaacgtctacatttttggatttcatatagctgaatatattaaagtcatttatgttgctaaatccagtggcttctagtagagccatcgctatatcctttaactttaacatgtctactatttgtgtattcttctaatggggtagctgtctccaatttttgcgtaatggattagtgccactgtctagtagtagtttgacgacctcgacattattacaatgctcattaaaaaggtatgcgtgtaaagcattattcttgaattggttcctggtatcattaggatctctgtctctcaacatctgtttaagttcatcgagagccacctcctcattttccagatagtcaaacattttgactgaatgagctactgtgaactctatacacccacacaactaatgtcattaaatattatttttttgaatgtatttataccatgtcaaaaacttgtacaattattaataaaaataatttagtgtttaaattttaccagttccagattttacacctccgttaaccccactttttacaccactggacgatcctcctccccacattccaccgccaccagatgtataagttttagatcctttattactaccatcatgtccatggataaagacactccacatgccgccactactaccccctttagaagacatattaataagacttaaggacaagtttaacaataaaattaatcacgagtaccctactaccaacctacactattatatgattatagtttctatttttacagtaccttaactaaagtctctagtcacaagagcaatactaccaacctacactattatatgattatagtttctatttttataggaacgcgtacgagaaaatcaaatgtctaatttctaacggtagtgttgataaacgattatcgtcaatggatacctcctctatcatgtcgtctattttcttactttgttctattaacttattagcattatatattatttgattataaaacttatattgcttattagcccaatctgtaaatatcggattattaacatatcgtttctttgtaggtttatttaacatgtacatcactgtaagcatgtccgtaccatttattttaatttgacgcatatccgcaatttctttttcgcagtcggttataaattctatatatgatggatacatgctacatgtgtacttataatcgactaatatgaagtacttgatacatattttcagtaacgatttattattaccacctatgaataagtacctgtgatcgtctaggtaatcaactgttttcttaatacattcgatggttggtaatttactcagaataatttccaatatcttaatatataattctgctatttctgggatatatttatctgccagtataacacaaatagtaatacatgtaaacccatattttgttattatattaatgtctgcgccattatctattaaccattctactaggctgacactatgcgacttaatacaatgataaagtatactacatccatgtttatctattttgtttatatcatcaatatacggcttacaaagttttagtatcgataacacatccaactcacgcatagagaaggtagggaataatggcataatatttattaggttatcatcattgtcattatctacaactaagtttccattttttaaaatatactcgacaactttaggatctctattgccaaatttttgaaaatatttatttatatgcttaaatctatataatgtagctccttcatcaatcatacatttaataacattgatgtatactgtatgataagatacatattctaacaatagatcttgtatagaatctgtatatcttttaagaattgtggatattaggatattattacgtaaactattacacaattctaaaatataaaacgtatcacggtcgaataatagttgatcaactatataattatcgattttgtgatttttcttcctaaactgtttacgtaaatagttagatagaatattcattagttcatgaccactatagttactatcgaataacgcgtcaaatatttcccgtttaatatcgcatttgtcaagataataatagagtgtggtatgttcacgataagtataataacgcatctcttttttgtgtgaaattaaatagtttatcacgtccaaagatgtagcataaccatcttgtgacctagtaataatataataatagagaactgttttacccattctatcatcataatcagtggtgtagtcgtaatcgtaatcgtctaattcatcatcccaattataatattcaccagcacgtctaatctgttctattttgatcttgtatccatactgtatgttgctacatgtaggtattcctttatccaataatagtttaaacacatctacattgggatttgatgttgtagcgtatttctctacaatattaataccatttttgatactatttatttctatacctttcgaaattagtaatttcaataagtctatatcgatgttatcagaacatagatattcgaatatatcaaaatcattgatatttttatagtcgactgacgacaataacaaaatcacaacatcgtttttgatattattatttttcttggtaacgtatgcctttaatggagtttcaccatcatactcatataatggatttgcaccactttctatcaatgattgtgcactgctggcatcgatgttaaatgttttacaactatcatagagtatcttatcgttaaccatgattggttgttgatgctatcgcattttttggtttctttcatttcagttatgtatggatttagcacgtttgggaagcatgagctcatatgatttcagtactgtagtgtcagtactattagtttcgatcagatcaatgtctagatctatagaatcaaaacacgataggtcagaagataatgaatatctgtacgcttctttttgtactgtaacttctggttttgttagatggttgcatcgtgctttaacatcaatggtacaaattttatcctcgctttgtgtatcatattcgtctctagtataaaattctatattcagattatcatgcgatgtgtatacgctaacggtatcaataaacggagcacaccatttagtcataacagtaatccaaaattttttaaagtatatcttaacgaaagaagttgtgtcattgtctacggtgtatggtactagatcctcataagtgtatatatctagagtaatgtttaatttattaaatggttgataatatggatcctcatgacaatttccgaagatggaaatgagatatagacatgcaataaatctaatcgaagacatggttactccttaaaaaaatacgaataatcaccttggctatttagtaagtgtcatttaacactatactcatattaatccatggactcataatctctatacgggattaacggatgttctatatacggggatgagtagttttcttctttaactttatactttttactaatcatatttagactgatgtatgggtaatagtgtttaaagagttcgttctcatcatcagaataaatcaatatctctgtttttttgttatacagatgtattacagcctcatatattacgtaatagaacgtgtcatctaccttattaactttcaccgcatagttgtttgcaaatacggttaatcctttgacctcgtcgatttccgaccaatctgggcgtataatgaatctaaactttaatttcttgtaatcattcgaaataatttttagtttgcatccgtagttatcccctttatgtaactgtaaatttctcaacgcgatatctccattaataatgatgtcgaattcgtgctgtatacccatactgaatggatgaactaacgaatatcaacggcgttaatagtaatttactttttcatctttacatattgggtactagttttactatcataagtttataaattccacaagctactatggaataagccaaccatcttagtataccacacatgtcttaaagtttattaattaattacatgttgttttatatatatcgctacgaatttaaagagaaatcagtttaggaagaaaaaaattatctatctacatcatcacgtctctgtattctacgatagagtgctactttaagatgagacatatccgtgtcatcaaaaatatactccattaaaatgattattccggcagcgaacttgatattggatatatcacaacctttgttaatatctacgacaatagacagcagtcccatggttccataaacagtgagtttatctttctttgaagcgatagtttgtagagatcttataaaaccgtcaaacgacatcgcatttatatctttagctaattcatatatgttaccatcgtaatatctaaccgcgtctatcttaaacgtttccatcgctttaaagacgtttccgatagatggtctcatttcatcagtcatactgagccaacaaatataatcgtgtataacatctttgatagaatcagactctaaagaaaacgaatcggctttattatacgcattcatgataaacttaatgaaaaatgtttttcgttgtttaagttggatgaatagtatgtcttaataattgttattatttcattaattaatatttagtaacgagtacactctataaaaacgagaatgacataactagttatcaaagtgtctaggacgcgtaattttcatatggtatagatcctgtaagcattgtctgtattctggagctattttctttatcgcattagtaagttcagaatatgttataaatttaaatcgaataacgaacatgactttagtaaagtcgtctatattaactcttttattttctagccatcgtaataccatgtttaagatagtatattctctagttactacgatctcatcgttgtctagaatatcacatactgaatctacatccaattttagaaattggtctgtgttacatatctcttctatattattgttgatgtattgtcgtagaaaactattacgtagaccattttctttataaaacgaatatatagtactccaattatctttaccgatatatttgcacacataatccattctctcaatcactacatctttaagattttcgttgttaagatatttggctaaactatataattctattagatcatcaacagaatcagtatatatttttctagatccaaagacgaactctttggcgtcctctataatattcccagaaaagatattttcgtgttttagtttatcgagatctgatctgttcatatacgccatgattgtacggtacgttatgataaccgcataaaataaaaatccattttcatttttaaccaatactattcataattgagattgatgtaatactttgttactttgaacgtaaagacagtacacggatccgtatctccaacaagcacgtagtaatcaaatttggtgttgttaaacttcgcaatattcatcaatttagatagaaacttatactcatcatctgttttaggaatccatgtattattaccactttccaacttatcattatcccaggctatgtttcgtccatcatcgttgcgcagagtgaataattcttttgtattcggtagttcaaatatatgatccatgcatagatcggcaaagctattgtagatgtgatttttcctaaatctaatataaaactcgtttactagcaaacactttcctgatttatcgaccaagacacatatggtttctaaatctatcaagtggtggggatccatagttatgacgcagtaacatagattattacattcttgactgtcgctaatatctaaatatttattgttatcgtattggattctgcatatagatggcttgtatgtcaaagatatagaacacataaccaatttatagtcgcgctttacattctcgaatctaaagttaagagatttagaaaacattatatcctcggatgatgttatcactgtttctggagtaggatatattaaagtctttacagatttcgtccgattcaaataaatcactaaataatatcccacattatcatctgttagagtagtatcattaaatctattatattttatgaaagatatatcactgctcacctctatatttcgtacatttttaaactgtttgtataatatctctctgatacaatcagatatatctattgtgtcggtagacgataccgttacatttgaattaatggtgttccattttacaacttttaacaagttgaccaattcatttctaatagtatcaaactctccatgattaaatattttaatagtatccattttatatcactacggacacaaagtagctgacataaaccattgtataatttttatgttttatgtttattagcgtacacattttggaagttccggcttccatgtatttcctggagagcaagtagatgatgaggaaccagatagtttatatccgtacttgcacttaaagtctacattgtcgttgtatgagtatgatcttttaaacccgctagacaagtatccgtttgatattgtaggatgtggacatttaacaatctgacacgtgggtggatcggaccattctcctcctgaacacaggacaccagagttaccaatcaacgaatatccactattgcaactataagttacaacgctcccatcggtataaaaatcctcgtatccgttatgtcttccgttggatatagatggaggggattggcatttaacagattcacaaataggtgcctcgggattccataccatagatccagtagatcctaattcacaatacgatttagattcaccgatcaaatgatatccgctattacaagagtacgttatactagagccaaagtctactccaccaatatcaagttggccattatcgatatctcgaggcgatgggcatctccgtttaatacattgattaaagagtgtccatccagtacctgtacatttagcatatataggtcccattttttgctttctgtatccaggtagacatagatattctatagtgtctcctatgttgtaattagcattagcatcagtctccacactattcttaaatttcatattaatgggtcgtgacggaatagtacagcatgatagaacgcatcctattcccaacaatgtcaggaacgtcacgctctccaccttcatatttatttatccgtaaaaatgttatcctggacatcgtacaaataataaaaagcccatatatgttcgctattgtagaaattgtttttcacagttgctcaaaaacgatggcagtgacttatgagttacgttacactttggagtctcatctttagtaaacatatcataatattcgatattacgagttgacatatcgaacaaattccaagtatttgattttggataatattcgtattttgcatctgctataattaagatataatcaccgcaagaacacacgaacatctttcctacatggttaaagtacatgtataattctatccatttgtcttccttaactatatatttgtatagataattacgagtctcgtgagtaattccagtaattacatagatgtcgccgtcgtactctacagcataaactatactatgatgtctaggcatgggagacttttttatccaacgatttttagtgaaacattccacatcgtttaatactacatatttttcatacgtggtataaactccacccattacatatatatcatcgtttacgaataccgacgcgcctgaatatctaggagtaattaagtttggaagtcttatccatttcgaagtgccgtgtttcaaatattctgccacacccgttgaaatagaaaattctaatcctcctattacatataactttccatcgttaacacaagtactaacttctgattttaacgacgacatattagtaaccgttttccattttttcgtttcaagatctacccgcgatacggaataaacatgtctattgttaatcatgccgccaataatgtatagacaattatgtaaaacatttgcattatagaattgtctatctgtattaccgactatcgtccaatattctgttctaggagagtaatgggttattgtggatatataatcagagtttttaatgactactatattatgttttataccatttcgtgtcactggctttgtagatttggatatagttaatcccaacaatgatatagcattgcgcatagtattagtcataaacttgggatgtaaaatgttgatgatatctacatcgtttggatttttatgtatccactttaataatatcatagctgtaacatcctcatgatttacgttaacgttttcgtgggataagatagttgtcagttcatcctttgataattttccaaattctggatcggatgtcaccgcagtaatattgttgattatttctgacatcgacgcattatatagttttttaattccatatcttttagaaaagttaaacatccttatacaatttgtggaattaatattatgaatcatagtttttacacatagatctactacaggcggaacatcaattattatggcagcaactagtatcatttctacattgtttatggtgatgtttatcttcttccagcgtatatagtctaatagcgattcaaacgcgtgatagtttataccattcaatataatcgcttcatcctttagatggtgatcctgaattcgtttaaaaaaattatacggagatgccgtaataatttccttattcacttgtataatttccccattgatagaaaatatcacgctttccattcttgaagtactataagtaattatagtataatgtaaaggtttatatattcaatattttttataaaaaaatcattttgacattaattcctttttaaatttccgtctatcatctatagaaacgtattctatgaatttataaaatgcttttacgtgtcctatcgtaggcgatagaaccgctaaaaagcctatcgaatttctacaaaagaatctgttatatggtatagggagagtataaaacattaaatgtccgtacttattaaagtattcagtagccaatcctaactctttcgaatacttattaatggctcttgttctgtacgaatctatttttttgaacaacggacctagtggtatatcttgttctatgtatctaaaataatgtctgactagatccgttagtttaatatcctcagtcatcttgtctagaatggcaaatctaactgcgggtttaggctttagtttagtttttatatctacatctatgtctttatctaacaccaaaaatataatagctaatattttattacaatcatccggatattcttctacgatctcactaactaatgtttctttggttatactagtatagtcactatcggacaaataaagaaaatcagatgatcgatgaataatacatttaaattcatcatctgtaagatttttgagatgtctcattaaaatattattagggtcagtactcattatcattcggcagctattacttattttatttttctgtattttattatttttcaccatatagatcaatcattagatcatcaaaatatgtttcaatcatcctaaagagtatggtgaatgactcttcccatctaatttctgaacgttcaccaatgtctctagccactttggcactaatagcgatcattcgcttagcgtcttctatattattaactggttgattcaatctatctagcaatggaccgtcggacagcgtcattctcatgttcttaatcaatgtacatacatcgccgtcatctaccaattcatccaacaacataagctttttaaaatcatcattataataggtttgatcgttgtcatttctccaaagaatatatctaataagtagagtcctcatgcttagtaatttaactattttagttaacaactattttttatgttaaatcaattagtacaccgctatgtttaatacttattcatattttagtttttaggattgagaatcaatacaaaaaattaatgcatcattaattttagaaatacttagtttccacgtagttaatgaaacatttgaactcatcgtacaggacgttctcgtacaggacgtaactataaaccggtttatatttgttcaagatagatacaaatccgataactttttttacgaattctacgggatccactttaaaagtgtcataccgggttctttttattcttttaaacagatcaatggtgtgatgttgattaggtcttttacgaatttgatatagaatagcgttcacatatcctccataatggtcaatcgccatttgttcgtatgtcataaattctttaattatatgacactgtgtattatttagttcatccttgttcatcattaggaatctatccaaaatggcaattatactagaactataggtgcgttgtatacacatattgatgtgtctgtttatacaatccatgatatttggatccatgctactaccttcgggtaaaattgtagcatcatataccatttctagtactttaggttcattattatccattgcagaggacgtcatgatcgaatcctaaaaaaatatattatttttatgttattttgttaaaaataatcatcgaatacttcgtaagatactccttcatgaacataatcagttacaaaacgtttatatgaagtaaagtatctacgatttttacaaaagtccggatgcataagtacaaagtacgcgataaacggaataataatagatttatctagtctatctttttctatagctttcatagttagatacatggtctcagaagtaggattatgtaacatcagcttcgataaaatgactgggttatttagtcttacacattcgctcatacatgtatgaccgttaactacaaagtctacactaaaatgattgaacaatagatagtctaccattgtttcgtattcagatagtacagcgtagtacatagcatcttcacaaattatatcattgtctaatagatatttgacgcatcttatggatcccacttcaacagccatcttaaaatcggtagaatcatattgctttcctttatcattaataatttctaaaacatcatctctatcataaaagatacaaatattaactgtttgatccgtaataacattgctagtcgatagcaatttgttaataagatgcgctgggctcaatgtcttaataagaagtgtaagaggactatctccgaatttgttttgtttattaacatccgttgatggaagtaaaagatctataatgtctacattcttgactgttttagagcatacaatatggagaggtgtatttccatcatgatctggttttgagggactaattcctagtttcatcatccatgagattgtagaagcttttggattgtctgacataagatgtctatgaatatgatttttgccaaatttatccactatcctggcttcgaatccgatggacattatttttttaaacactctttctgaaggatctgtacacgccaacaacggaccacatccttcttcatcaaccgagttgttaatcttggctccatactgtaccaataaatttattctctctatgacttcatcatctgttcccgagagataatatagaggtgttttattatgtttatcacacgcgtttggatctgcgccgtgcgtcagcagcatcgcgactattctattattattaattttagaagctatatgcaatggataatttccatcatcatccgtctcatttggagagtatcctctatgaagaagttcttcgacaaatcgttcatctagtcctttaattccacaatacgcatgtagaatgtgataattatttccagaaggttcgatagcttgtagcatattcctaaatacatctaaatttttactattatatttggcataaagagatagataatactcggccgacataatgttgtccattgtagtataaaaattaatatttctatttctatttctgtatatttgcaacaatttactctctataacaaatatcataacttagttcttttatgtcaagaaggcactggtttagttcatctataaatgtcacgccataactaccacgcatgctatactcagaattatgataaagatatttatccttggggtgtaggtaatggggattaatctttgttggatcagtctctaagttaacacatgtcacacatgatccatttatagttatatcacacgatgatgatttatgaattgattccggaagatcgctatcgtattttgtggttccacaattcatttccatacatgttattgtcacactaatattatgatgaactttatctagccgctgagtggtaaacaacagaacagatagtttattatctttaccaacaccctcagccgctgccacaaatctctgatccgtatccatgatggtcatgtttatttctagtccgtatccagtcaacactatgttagcatttctgtcgatatagctttcactcatatgacactcaccaataatagtagaattaatgtcgtaatttacaccaatagtgagttcggcggcaaagtaccaataccggtaatcttgtcgaggaggacatatagtattcttgtattctaccgaatacccgagagatgcgatacaaaagagtaagactaatttgtaaaccatcttactcaaaatatgtaacaatagtacgatgcaatgagtaagacaataggaaatctatcttatatacacataattattctatcaattttaccaattagttagtgtaatgttaacaaaaatgtgggagaatctaattagtttttctttacacaattgacgtacatgagtctgagttccttgtttttgctaattatttcatccaatttattattcttgactatatcgagatcttttgtataggagtcagacttgtattcaacatgcttttctataatcattttagctatttcggcatcatccaatagtacattttccagattagcagaatagatattaatgtcgtatttgaacagagcctgtaacatctcaatgtctttattatctatagccaatttaatgtccggaatgaagagaagggaattattggtgtttgtcgacgtcatatagtcgagcaagagaatcatcatatccacgtgtccattttttatagtgatgtgaatacaactaaggagaatagccagatcaaaagtagatggtatctctgaaagaaagtaggaaacaatacttacatcattaagcatgacggcatgataaaatgaagttttccatccagttttcccatagaacatcagtctccaatttttcttaacaaacagttttaccgtttgcatgttaccactatcaaccgcataatacaatgcggtgtttcccttgtcatcaaattgtgaatcatccagtccactgaatagcaaaatctttactattttggtatcttccaatgtggctgcctgatgtaatggaaattcattctctagaagatttttcaatgctccagcgttcaacaacgtacatactagacgcacgttattatcagctattgcataatacaaggcactatgtccatggacatccgccttaaatgcatctttgctagagagaaagcttttcagctgcttagacttccaagtattaattcgtgacagatccatgtctgaaacgagacgctaattagtgtatattttttcattttttataattttgtcatattgcaccagaattaataatatctctaatagatctgattagtagatacatggctatcgcaaaacaacatatacacatttaataaaaataatatttattaagaaaattcagatttcacgtacccatcaatataaataaaataatgattccttacaccgtacccatattaaggagattccaccttacccataaacaatataaatccagtaatatcatgtctgatgatgaacacaaatggtgtattaaattccagtttttcaggagatgatctcgccgtagctaccataatagtagatgcctctgctacagttccttgttcgtcgacatctatctttgcattctgaaacattttataaatatataatgggtccctagtcatatgtttaaacgacgcattatctggattaaacatactaggagccatcatttcggctatcgacttaatatccctcttattttcgatagaaaatttagggagtttaagattgtacactttattccctaattgaaacgaccaatagtctaattttgcagccgtaatagaatctgtgaaatgggtcatattatcacctattgccaggtacatactaatattagcatccttatacggaaggcgtaccatatcatattcttcgtcatcgattgtgattgtatttccttgcaatttagtaactacgttcatcatgggaaccgttttcgtaccgtacttattagtaaaactagcattgcgtgttttagtgatatcaaacggatattgccatatacctttaaaatatatagtattaatgattgcccatagagtattattgtcgagcatattagaatctactacattagacataccggatctacgttctactatagaattaattttattaaccgcatctcgtctaaagtttaatctatataggccgaatctatgatattgttgataatacgacggtttaatgcacacagtattatctacgaaactttgataagttagatcagtgtacgtatatttagatgttttcagcttagctaatcctgatattaattctgtaaatgctggacccagatctctttttctcaaatccatagtcttcaataattctattctagtattacctgatgcaggcaatagcgacataaacatagaaaacgaataaccaaacggtgagaagacaatattatcatcttgaatatttttatacgctactataccggcattggtaaatccttgcagacgataggtagacactgaacacgttaacgatagtatcaataacgcaatcatgattttatggtattaataattaaccttatttttatgttcggtataaaaattattgatgtctacacatccttttgtaattgacatctatatatccttttgtataatcaactctaatcactttaacttttacagttttccctaccagtttatccctatattcaacatatctatccatatgcatcttaacactctctgccaagatagcttcaaagtgaggatagtcaaaaagataaatatatagagcataatccttctcgtatactctgccctttattacatcacccgcattgggcaacgaataacaaaatgcaagcatcttgttaacgggctcgtaaattgggataaaaattatgtttttatatctattttattcaagagaatattcaggaatttctttttccggttgtatctcatcgcagtatatatcatttgtacattgtttcatattttttaatagtctacaccttttagtaggactagtatcgtacaattcatagctgtattttgaattccaatcacgcataaaaatatcttccaattgttgacgaagacctaatccatcatccggtgtaatattaatagatgctccacatgtatccgtaaagtaatttcctgtccaatttgaggtacctatatacgccgttttatcggttaccatatatttggcatggtttaccctagaatacggaatgggaggatcagcatctggtacaataaatagctttacttctatatttatgtttttagattttagcatagcgatagatcttaaaaagtttctcatgataaacgaagatcgttgccagcaactaatcaatagcttaactgacacttgtctgtctatagcggctcttcttaattcatcttctatataaggccaaaacaaaatattgcctgccttcgaataaataatagggataaagttcataacagatacataaacgaatttactcgcatttctgatacatgacaataaagcggttaaatcattggttctttccatagtacatagttgttgcggtgcagaagcaataaatacagagtgtggaacgccgcttacgttaatactaagaggatgatctgtattataatacgacggataaaagtttttccaattatatggtagattgttaactccaagataccagtatacctcaaaaatttgagtgagatccgctgccaagttcctattattgaagatcgcaatacccaattctttgacctgagttagtgatctccaatccatgttagcgcttcctaaataaatatgtgtattatcagatatccaaaattttgtatgaagaactcctcctaggatatttgtaatatctatgtatcgtacttcaactccggccatttgtagtctttcaacatcctttaatggtttgttagatttattgacggctactctaactcgtactcctcttttgggtaattgtacaatcttgtttaatattatcgtgccgaaattcgtacccacttcatccgataaactccaataaaaagatgatatatctagtgtttttgtggtattggatagaatttccctccacatgttaaatgtagacaaatatactttatcaaattgcatacctataggaatagtctctgtaatcactgcgattgtattatccggattcattttatttgttaaaagaataatcctatatcacttcactctattaaaaatccaagtttctatttctttcatgactgattttttaacttcatccgtttccttatgaagatgatgtttggcaccttcataaatttttatttctctattacaatttgcatgttgcatgaaataatatgcacctaaaacatcgctaatcttattgtttgttccctggagtatgagagtcggggggtgttaatcttggaaattatttttctaaccttgttggtagccttcaagacctgactagcaaatccagccttaattttttcatgattgattaatgggtcgtattggtatttataaactttatccatatctctagatactgattctggacatagctttccgactggcgcatttagtgtgatggttcccataagtttggcagctagcagattcagttttgaaacagcatctgcattaactagaggagacattagaatcattgctgtaaacaagtttggattatcgtaagaggctagctcccatggaatgacccaataagtagatttaatagttaccacgtgctgtaccaaagtcatcaatcatcattttttcaccattacttcttccatgtccaatatgatcatgtgagaatactaaaattcctaacgatgatatgttttcagctagttcgtcataacgtccagaatgtttaccagctccatgacttatgaatactaatgccttaggatatgtaataggtttccaatatatgtaatcattgtccagattgaacatacagtttgcactcatgattcacgttatataactatcaatattaacagttcgtttgatgatcatattatttttatgttttattgataattgtaaaaacatacaattaaatcaatatagaggaaggagacggctactgtcttttgtgagatagtcatggcgactaaattagattatgaggatgctgttttttactttgtggatgatgataaaatatgtagtcgcgactccatcatcgatctaatagatgaatatattacgtggagaaatcatgttatagtgtttaacaaagatattaccagttgtggaagactgtacaaggaattgatgaagttcgatgatgtcgctatacggtactatggtattgataaaattaatgagattgtcgaagctatgagcgaaggagaccactacatcaattttacaaaagtccatgatcaggaaagtttattcgctaccataggaatatgtgctaaaatcactgaacattggggatacaaaaagatttcagaatctagattccaatcattgggaaacattacagatctgatgaccgacgataatataaacatcttgatactttttctagaaaaaaaattgaattgatgatataggggtcttcataacgcataattattacgttagcattctatatccgtgttaaaaaaaattatcctatcatgtatttgagagttttatatgtagcaaacatgatagctgtgatgccaataagctttagatattcacgcgtgctagtgttagggatggtattatctggtggtgaaatgtccgttatataatctacaaaataatcatcgcatatagtatgcgatagtagagtaaacatttttatcgtttctactgggttcatacatcgtctacccaattcggttataaatgaaattgtcgccaatcttacacccaaccccttgttatccattagtatagtattaacttcgttatttatgtcataaactgtaaatgattttgtagatgccatatcatacatgatattcatgtccctattataatcattactaactttatcacaatatatgttgataatatctatatatgatctagtctttgtgggcaactgtctatacaagtcgtctaaacgttgtttactcatatagtatcgaacagccatcattacatggtcccgttccgttgatagataatcgagtatgttagtggacttgtcaaatctatataccatattttctggaagtggatatacatagtcgtgatcaacattattgctagcctcatcttctatatcctgtactataccattatctatatcatctacataatctacgatattattacacataaacatcgacaacatactattgtttattatctaagtcctgttgatccaaacccttgatctcctctatttgtactatctagagattgtacttcttccagttctggataatatatacgttgatagattagctgagctattctatctccagtatttacattaaacgtacattttccattattaataagaatgactcctatgtttcccctataatcttcgtctattacaccgcctcctatatcaatgccttttagggacagaccagacctaggagctattctaccatagcagaacttaggcatggacatactaatatctgtcttaattaactgtcgttctcctggagggatagtataatcgtaagcgctatataaatcatatccggcggcgtaaggtgattgcctagtaggagatttagctctgttagtttccttaacaaatctaactggtgagttaatattcatgttgaacataaaactaatattttatttcaaaattatttaccatcccatatattccatgaataagtgtgatgattgtacacttctatagtatctatatacgattcacgataaaatcctcctatcaatagcagtttattatccactatgatcaattctggattatccctcggataaataggatcatctatcagagtccatgtattgctggattcacaataaaattccgcatttctaccaaccaagaataaccttctaccgaacactaacgcgcatgatttataatgaggataataagtggatggtccaaactgccactgatcatgattgggtagcaaatattctgtagttgtatcagtttcagaatgtcctcccattacgtatataacattgtttatggatgccactgctggattacatctaggtttcagaagactcggcatattaacccaagcagcatccccgtggaaccaacgctcaacagatgtgggatttggtagacctcctactacgtataatttattgttagcgggtatcccgctagcatacagtctggggctattcatcggaggaattggaatccaattgtttgatatataatttaccgctatagcattgttatgtatttcattgttcatccatccaccgatgagatatactacttctccaacatgagtacttgtacacatatggaatatatctataatttgatccatgttcataggatactctatgaatggatacttgtatgatttgcgtggttgtttatcacaatgaaatattttggtacagtctagtatccattttacattatttatacctctgggagaaagataatttgacctgattacatttttgataaggagtagcagatttcctaatttatttcttcgctttatataccacttaatgacaaaatcaactacataatcctcatctggaacatttagttcatcgctttctagaataagtttcatagatagataatcaaaattgtctatgatgtcatcttccagttccaaaaagtgtttggcaataaagtttttagtatgacataagagattggatagtccgtattctatacccatcatgtaacactcgacacaatattcctttctaaaatctcgtaagataaagtttatacaagtgtagatgataaattctacagaggttaatatagaagcacgtaataaattgacgacgttatgactatctatatatacctttccagtatacgagtaaataactatagaagttaaactgtgaatgtcaaggtctagacaaacccttgtaactggatctttatttttcgtgtatttttgacgtaaatgtgtgcgaaagtaaggagataactttttcaatatcgtagaattgactattatattgccacctatagcatcaataattgttttgaatttcttagtcatagacaatgctaatatattcttacagtacacagtattaacaaatatcggcatttatgtttctttaaaagtcaacatctaaagaaaaatgattatcttcttgagacataactcccattttttggtattcacccacacgtttttcgaaaaaattagtttttccttccaatgatatattttccatgaaatcaaacggattggtaacattataaatttttttaaatcccaattcagaaatcaatctatccgcgacgaattctatatatgttttcatcatttcacaattcattcctataagtttaactggaagagccgcagtaagaaattcttgttcaatggataccgcatctgttataatagatctaacggtttcttcactcggtggatgcaataaatgtttaaacatcaaacatgcgaaatcgcagtgcagaccctcgtctctactaattagttcgttggaaaacgtgagtccgggcattaggccacgctttttaagccaaaatatggaagcgaatgatccagaaaagaagattccttctactgcagcaaaggcaataagtctctctccataaccggcgctgtcatgtatccacttttgagcccaatcggccttcttttttacacaaggcatcgtttctatggcattaaagagatagtttttttcattactatctttaacataagtatcgatcaaaagactatacatttccgaatgaatgttttcaatggccatctgaaatccgtagaaacatctagcctcggtaatctgtacttctgtacaaaatcgttccgccaaattttcattcactattccgtcactggctgcaaaaaacgccaatacatgttttataaaatatttttcgtctggtgttagtttattccaatcattgatatctttagatatatctacttcttccactgtccaaaatgatgcctctgcctttttatacatgttccagatgtcataatattggattgggaaaataacaaatctatttggatttggtgcaaggatgggttccataactaaattaacaataacaataaattttttttcagttatctatatgcctgtacttggatcttttgtacatcgatatcgccgcaatcactacaataattacaagtattattgatagcattgttattagtactatcataattaaattatcgacattcatgggtgctgaataatcgttattatcatcattatcattttgtaattgtgacatcatactagataaatcgtttgcgagattgttgtgggaagcgggcatggaggatgaattatcgttattattatttaacgcctcccattcggattcacaaatgttacgcacattcaacattttatggaaactataattttgtgaaaacagataacaagaaaactcgtcatcgttcaaatttttaacgatagtaaaccgattaaacgtcgagctaatttctaacgctagcgactctgttggatatgggtttccagatatatatcttttcagttcccctacgtatctataatcatctgtaggaaatggaagatatttccatttatctactgttcctaatatcatatgtggtggtgtagtagaaccattaagcgcgaaagatgttatttcgcatcgtattttaacttcgcaataatttctggttagataacgcactctaccagtcaagtcaatgatattagcctttacagatatattcatagtagttgtaacgatgactccatcttttagatgcgatactcctttgtatgtaccagaatcttcgtaccgcaaactcgatatatttaaacaagttaatgagatattaacgcgttttatgaatgatgatatataaccagaagttttatcctcggtggctagcgctataaccttatcattataataccaactagtgtgattaatatgtgacacgttagtgtgggtacaaatatgtacattatcgtctacgtcgtattcgatacatccgcatacagccaacaaatataaaatgacaaatactctaacgccgttcgtacccatcttgatgcggtttaataaatgttttgatttcaatttattgtaaaaaaagattcggttttatactgttcgatattctcattgcttatattttcatctatcatctccacacagtcaaatccgtggttagcatgcacctcatcaaccggtaaaagactatcggactcttctatcattataactctagaatatttaatttggtcattattaatcaagtcaattatcttatttttaacaaacgtgagtattttactcattttttataaaaacttttagaaatatacagactctatcgtgtgtctatatcttctttttatatccaatgtatttatgtctgatttttcttcatttatcatatataatggtccaaattctacacgtgcttcggattcatccagatcattaaggttcttataattgtaacatccttctcttccctcttctacatcttccttcttattcttattcttagcgtcacagaatctaccacagcaggatcccatgacgagcgtcatattaaactaatccattttcaattataatatacgattagtaatgaccattaaaataaaaaatattcttcataaccggcaagaaagtgaaaagttcacattgaaactatgtcagtagtatacatcatgaaatgatgatatatatatactctattttggtggaggattatatgatataattcgtggataatcattcttaagacacatttcttcattcgtaaatcttttcacgttaaatgagtgtccatattttgcaatttcttcatatgatggcggtgtacgtggacgaagctgctcctgttcttgttgtagtcgccgactgtcgtgtttgcgtttagatccctccattatcgcgattgcgtagatggagtactattatataccttgtaattaaatttttttattaattaaacgtataaaaacgttccgtatctgtatttaagagccagatttcgtctaatagaacaaatagctacagtaaaaataactagaataattgctacacccactagaaaccacggatcgtaatacggcaatcggttttcgataataggtggaacgtatattttatttaaggacttaacaattgtctgtaaaccacaatttgcttccgcggatcctgtattaactatctgtaaaagcatatgttgaccgggcggagccgaacattctccgatatctaatttctgtatatctataatattattaacctccgcatacgcattacagttcttttctagcttggataccgcactaggtacatcgtctagatctattcctatttcttcagcgatagctcttctatccttttccggaagcaatgaaatcacttcaataaatgattcaaccatgagtgtgaaactaagtcgagaattactcatgcatttgttagttattcggagcgcgcaatttttaaactgtcctataacctctcctatatgaatagcacaagtgacattagtagggatagaatgttgagctaatttttgtaaataactatctataaaaagattatacaaagttttaaactctttagtttccgccatttatccagtctgagaaaatgtctctcataataaatttttccaagaaactaattgggtgaagaatggaaacctttaatctatatttatcacagtctgttttggtacacatgatgaattcttctaatgctgtactaaattcgatatctttttcgatttctggatatgtttttaataaagtatgaacaaagaaatggaaatcgtaataccagttatgttcaactttgaaattgttttttattttcttgttaatgattccagccacttgggaaaagtcaaagtcgtttaatgccgatttaatacgttcattaaaaacaaactttttatcctttagatgaattattattggttcattggaatcaaaaagtaagatattatcgggtttaagatctgcgtgtaaaaagttgtcgcaacagggtagttcgtagattttaatgtataacagagccatctgtaaaaagataaactttatgtattgtaccaaagatttaaatcctaatttgatagctaactcggtatctactttatctgccgaatacagtgctaggggaaaaattataatatttcctctttcgtattcgtagttagttctcttttcatgttcgaaaaagtgaaacatgcggttaaaatagtttataacattaatattactgttaataactgccggataaaagtgggatagtaatttcacgaatttgatactgtcctttctctcgttaaacgcctttaaaaaaactttagaagaatatctcaatgagagttcctgaccatccatagtttgtatcaataatagcaacatatgaagaacccgtttatacagagtatgtaaaaatgttaatttatagtttaatcccatggcccacgcacacacgattaattttttttcatctccctttagattgttgtatagaaatttgggtactgtgaactccgccgtagtttccatgggactatataattttgtggcctcgaatacaaattttactacatagttatctatcttaaagactataccatatcctcctgtagatatgtgataaaaatcgtcgtttataggataaaatcgtttatccttttgttggaaaaaggatgaattaatgtaatcattctcttctatctttagtagtgtttccttattaaaattcttaaaataatttaacaatctaactgacggagcccaattttggtgtaaatctaattgggacattatgttgttaaaatacaaacagtctcctaatataacagtatctgataatctatggggagacatccattgatattcaggggatgaatcattggcaacacccatttattgtacaaaaagccccaatttacaaacgaaagtccaggtttgatagagacaaacaattaactattttgtctctgtttttaatttctttggtaatgaaattattcacaatatcagtatcttctttatctaccagagattttactaacttgataaccttggctgtctcattcaatagggtagtaatatttgtatgtgtgatattgatatctttttgaattgtttcttttagaagtgattctttgatggtgccagcatacgaattacaataatgcagaaactcagttaacatgcaggaattatagtaagccaattccaattgttgcctgtattgtattagagtattaatatgcgcaatggtgtccttgcgtttctctgatagaatgcgagcagcgattttggcgttatcatttgacgatatttctggaatgacgaatcctgtttctactaactttttggtaggacaaagtgaaacaatcaagaagatagcttctcctcctatttgtggaagaaattgaactcctctagatgatctactgacgatagtatctccttgacagatattggaccgaattacagaagtacctggaatgtaaagccctgaaaccccctcattttttaagcagattgttgccgtaaatcctgcactgtgaccaagatagagagctcctttggtgaatccatctctatgtttcagtttaaccaagaaacagtcagctggtctaaaatttccatctctatctaatacagcatctaacttgatgtcaggaactatgaccggtttaatgttatatgtaacattgagtaaatccttaagttcataatcatcactgtcatcagttatgtacgatccaaacaatgtttctactggcatagtggatacgaagatgctatccatcagaatgtttccctgattagtattttctatatagctattcttctttaaacgattttccaaatcagtaactatgttcatttttttaggagtaggacgcctagccagtatggaagaggattttctagatcctctcttcaacatctttgatctcgatggaatgcaaaaccccatagtgaaacaaccaacgataaaaataatattgtttttcactttttataattttaccatctgactcatggattcattaatatctttataagagctactaacgtataattctttataactgaactgagatatatacaccggatctatggtttccataattgagtaaatgaatgctcggcaataactaatggcaaatgtatagaacaacgaaattatactagagttgttaaagttaatattttctatgagctgttccaataaattatttgttgtaactgcgttcaagtcataaatcatcttgatactatccagtaaaccgtgtttaagttctggaatattatcatcccattgtaaagcccctaattcgactatcgaatatcctgctctgatagcagtttcaatatcgacggacgtcaatactgtaataaaggtggtagtattgtcatcatcgtgataaactacgggaatatggtcgttagtaggtacggtgactttacacaacgcgatatataactttccttttgtaccatttttaacgtagttgggacgtcctgcagggtattgttttgaagaaatgatatcgagaacagatttgatacgatatttgttggattcctgattattcactataatataatctagacagatagatgattcgataaatagagaaggtatatcgttggtaggataatacatccccattccagtattctcggatactctattgatgacactagttaagaacatgtcttctattctagaaaacgaaaacatcctacatggactcattaaaacttctaacgctcctgattgtgtctcgaatgcctcgtacaaggatttcaaggatgccatagattctttgaccaacgatttagaattgcgtttagcatctgatttttttattaaatcgaatggtcggctctctggtttgctaccccaatgataacaatagtcttgtaaagataaaccgcaagaaaatttatacgcatccatccaaataaccctagcaccatcggatgatattaatgtattattatagattttccatccacaattattgggccagtatactgttagcaacggtatatcgaatagattactcatgtaacctactagaatgatagttcgtgtactagtcataatatctttaatccaatctaagaaatttaaaattagattttttacactgttaaagttaacaaaggtattacccggatacgtggatatcatatatggcattggtccattatcagtaatagctccataaactgatacggcgatggtttttatatgtgtttgatctaacgaggaagaaattcgcgcccacaattcatctctagatatgtatttaatatcaaacggtaacacatcaatttcgggacgcgtatatgtttctaaatttttaatccaaatataatgatgacctatatgccctattatcatactgtcaactatagtacacctagagaacttacgatacatctgtttcctataatcgttaaattttacaaatctataacatgctaaaccttttgacgacagccattcattaatttctgatatggaatctgtattctcgataccgtattgttctaaagccagtgctatatctccctgttcgtgggaacgctttcgtataatatcgatcaacggataatctgaagtttttggagaataatatgactcatgatctatttcgtccataaacaatctagacataggaattggaggcgatgatcttaattttgtgcaatgagtcgtcaatcctataacttctaatcttgtaatattcatcatcgacataatactatctatgttatcatcgtatattagtataccacggccttcttcatttcgtgccaaaataatatacagtcttaaataattacgcaatatctcaatagtttcataattgttagctgttttcatcaagatttgtaccctgtttaacatgatggcgttctatacgtctctattttcttttttttaaatttttaacgatttactgtggctagatacccaatctctctcaaatatttttttagcctcgcttacaagctgtttatctatactattaaaactgacgaatccgtgattttggtaatgggttccgtcgaaatttgccgaagtgatatgaacatattcgtcgtcgactatcaacaattttgtattattctgaatagtgaaaaccttcacagatagatcattttgaacacacaacgcgtctagacttctggcggttgccatagaatatacgtcgttcttatcccaattaccaactagaagtctgatcttaactcctctattaatggctgcttctataatggagttgtaaatgtcgggccaatagtagctattaccgtcgacacgtgtagtgggaactatggccaaatgttcaatatctatactagtcttagccgacttgagtttatcaataactacatcggtatctagatctctagaatatcccaataggtgttccggagaatcagtaaagaacactccacctataggattcttaatatgatacgcagtgctaactggcaaacaacaagccgcagagcataaattcaaccatgaattttttgcgctattaaaggctttaaaagtatcaaatcttctacgaagatctgtggccagcgggggataatcagaatatacacctaacgttttaatcgtatgtatagatcctccagtaaatgacgcgtttcctacataacatctttcatcatctgacacccaaaaacaaccgagtagtagtcccacattattttttttatctatattaacggttataaaatttatatccgggcagtgactttgtagctctcccagatttcttttccctcgttcatctagcaaaactattattttaatccctttttcagatgcctcttttagtttatcaaaaataagcgctcccctagtcgtactcagaggattacaacaaaaagatgctatgtatatatatttcttagctagagtgataatttcgttaaaacattcaaatgttgttaaatgatcggatctaaaatccatattttctggtagtgtttctaccagcctacattttgctcccgcaggtaccgatgcaaatggccacatttagttaacataaaaacttatacatcctgttctatcaacgattctagaatatcatcggctatatcgctaaaattttcatcaaagtcgacatcacaacctaactcagtcaatatattaagaagttccatgatgtcatcttcgtctatttctatatccgtatccattgtagattgttgaccgattatcgagtttaaatcattactaatactcaatccttcagaatacaatctgtgtttcattgtaaatttataggcggtgtatttaagttggtagattttcaattatgtatcaatatagcaacagtagttcttgctcctccttgattctagcatcctcttcattattttcttctacgtacataagcatgtccaatacgttagacaacacaccgacgatggcggccgccacagacacgaatatgactagaccgatgaccatttaaaaacccctctctagctttcacttaaactgtatcgattattcttttagaacatgtataatataaaaacattattctatttcgaatttaggcttccaaaaatttttcatccgtaaaccgataataatatatatagacttgttaatagtcggaataaatagattaatgcttaaactatcatcatctccacgattagagatacaatatttacattttttttgctgtttcgaaactttatcaatacacgttaatacaaacccaggaaggagatattgaaactgaggctgttgaaaatgaaacggtgaatacaataattcagataatgtaaaatcatgattccgtattctgatgatattagaactgctaatggatgtcgatggtatgtatctaggagtatctattttaacaaagcatcgatttgctaatatacaattatccttttgattaattgttattttattcatattcttaaaaggtttcatatttatcaattcttctacattaaaaatttccatttttaatttatgtagcccccgcaatactcctcattacgtttcattttttgtctataatatccattttgttcatctcggtacatagattatccaattgagaagcgcatttagtagttttgtacattttaagtttattgacgaatcgtcgaaaactagttatagttaacattttattatttgataccctgatattaatacccctgccgttactattatttataactgatgtaatccacgtaacattagaattaattatcgatagtaatgcatcgacgcttccaaaattgtctattataaactcaccgataatttttttattgcatgttttcatattcattaggattatcaaatctttaatcttactacgattgtatgcgttgatattgcaagacgtcattctaaaagacggaggatctccatcaaatgccagacaatcacgtacaaagtacatggaaataggttttgttctattgcgcatcatagatttatatagaacacccgtagaaatactaatttgttttactctataaaatactaatgcatctatttcatcgttttgtataacgtctttccaagtgtcaaattccaaatttttttcattgatagtaccaaattcttctatctctttaactacttgcatagataggtaattacagtgatgcctacatgccgttttttgaaactgaatagatgcgtctagaagcgatgctacgctagtcacaatcaccactttcatatttagaatatatgtatgtaaaaatatagtagaatttcattttgtttttttctatgctataaatgaattctcattttgcatctgctcatactccgttttatatcaataccaaagaaggaagatatctggttctaaaagccgttaaagtatgcgatgttagaactgtagaatgcgaaggaagtaaagcttcctgcgtactcaaagtagataaaccctcatcgcccgcgtgtgagagaagaccttcgtccccgtccagatgcgagagaatgaataaccctggaaaacaagttccgtttatgaggacggacatgctacaaaatatgttcgcggctaatcgcgacaacgtggcgtcgagacttttgaactaaaatacaattatatccttttcgatattaataaatccgtgtcgtccaggttttttatctctttcagtatgtgaatagataggtattttatctctattcatcatcgaatttaagagatccgataaacattgtttgtattctccagatgtcagcatctgatacaacaatatatgtgcacataaacctctggcacttatttcatgtaccttccccttatcactaaggagaatagtatttgagaaatatgtatacatgatattatcatgaattagatatacagaatttgtaacactctcgaaatcacacgatgtgtcggcgttaagatctaatatatcactcgataacacattttcatctagatacactagacattttttaaagctaaaatagtctttagtagtgacagtaactatgcgattattttcatcgatgatacatttcatcggcatattattacgcttaccatcaaagactataccatgtgtatatctaacgtattctagcatggttgccatacgcgcattaaacttttcaggatctttggatagatcttccaatctatctatttgagaaaacatttttatcatgttcaatagttgaaacgtcggatccactatatagatattatctataaagattttaggaactacgttcatggtatcctggcgaatattaaaactatcaatgatatgattatcgttttcatcttttatcaccatatagtttctaagatatgggattttacttaatataatattatttcccgtgataaattttattagaaaggccaaatctataagaaaagttctagaattagtctgaagaatatctatatcgccgtaccgtatatttggattaattagatatagagaatatgatccgtaacatatacaacttttattatggcgtctaagatattcttccatcaacttattaacatttttgactagggaagatacattatgacgtcccattacttttgccttgtctattactgcgacgttcatagaatttagcatatctcttgccaattcttccattgatgttacattataagaaattttagatgaaattacatttggagctttaatagtaagaactcctaatatgtccgtgtatgtggtcactaatacagattgtagttctataatcgtaaataatttacctatattatatgtttgagtctgtttagaaaagtagctaagtatacgatcttttatttctgatgcagatgtattaacatcggaaaaaaatctttttttattcttttttactaaagatacaaatatgtctttgttaaaaacagttattttttgaatatttctagcttgtaattttaacatatgatattcgttcacactaggtactctgcctaaataggtttctataatctttaatgtaatattaggaagagtattctgatcaggattcctattcattttgaggatttaaaactctgattattgtctaatatggtctctacgcaaactttttcacagagcgatagagtttttgataactcgtttttcttaagaaatataaaactactgtctccagagctcgctctatcttttattttatttaattcgatacaaactcctgatactggttcagaaagtaattcattaattttcagtcctttatagaagatatttaatatagataatacaaaattttcagttcttgatatcgatctgattgatcctagaactagatatattaataacgtgctcattaggcagtttatggcagcttgataattagatatagtatattccagttcatatttattagataccgcattgcccagattttgatattctatgaattcctctgaaaataaatccaaaataactaaacattctattttttgtggattagtgtactctcttccctctatcatgttcactactggtgtccacgatgataaatatctagagggaatataatatagtccataggatgccaatctagcaatgtcgaataactgtaatttgattcttcgttcttcattatgaattgattcttgaggtataaacctaacacaaattatattattagacttttcgtatgtaatgtctttcatgttataagtttttaatcctggaatagaatctattttaatgaggcttttaaacgcagagttctccaacgagtcaaagcataatactctgttgtttttcttatatacgatgttacgattttcttctttgaatggaataggtttttgaattagtttataattacaacataatagataaggaagtgtgcaaatagtacgcggaaaaaacataatagctcccctgttttcatccatggttttaagtaaatgatcactggcttctttagtcaatggatattcgaacattaaccgtttcatcatcattggacagaatccatatttcttaatgtaaagagtgatcaaatcattgtgtttattgtaccatcttgttgtaaatgtgtattcggttatcggatctgctcctttttctattaaagtatcgatgtcgatctcgtctaagaattcaactatatcgacatatttcatttgtatacacataaccattactaacgtagaatgtataggaagagatgtaacgggaacagggtttgttgattcgcaaactattctaatacataattcttctgttaatacgtcttgcacgtaatctattatagatgccaagatatctatataattattttgtaagatgatgttaactatgtgatctatataagtagtgtaataattcatgtatttcgatatatgttccaactctgtctttgtgatgtctagtttcgtaatatctatagcatcctcaaaaaatatattcgcatatattcccaagtcttcagttctatcttctaaaaaatcttcaacgtatggaatataataatctattttacctcttctgatatcattaatgatatagtttttgacactatcttctgtcaattgattcttattcactatatctaagaaacggatagcgtccctaggacgaactactgccattaatatctctattatagcttctggacataattcatctattataccagaattaatgggaactattccgtatctatctaacatagttttaagaaagtcagaatctaagacctgatgttcatatattggttcatacatgaaatgatctctattgatgatagtgactatttcattctctgaaaattggtaactcattctatatatgctttccttgttgatgaaggatagaatatactcaatagaatttgtaccaacaaactgttctcttatgaatcgtatatcatcatctgaaataatcatgtaaggcatacatttaacaattagagacttgtctcctgttatcaatatactattcttgtgataatttatgtgtgaggcaaatttgtccacgttctttaattttgttatagtagatatcaaatccaatggagctacagttcttggcttaaacagatatagtttttctggaacgaattctacaacattattataaaggactttgggtagataagtgggatgaaatcctattttaattaatgcgatagccttgtcctcgtgcagatatccaaacgcttttgtgatagtatggcattcattgtctagaaacgctctacgaatatctgtgacagatatcatctttagagaatatactagtcgcgttaatagtactacaatttgtattttttaatctatctcaataaaaaaattaatatgtatgattcaatgtataactaaactactaactgttattgataactagaatcagaatctaatgatgacgtaaccaagaagtttatctactgccaatttagctgcattatttttagcatctcgtttagattttccatctgccttatcgaatactcttccgtcgatgtctacacaggcataaaatgtaggagagttactaggccccactgattcaatacgaaaagaccaatctctcctagtaatttggcagtactcattaataacggtgacagggttagcacctttccaatcaataatttttttagccggaataacatcatcaaaagacttatgatcctctctcattgatttttcgcgggatacatcatctattatgacgtcagccatagcatcagcatccggcttatccgcctccgttgtcataaaccaacgaggaggaatatcgtcggagctgtacaccatagcactacgttgaagatcgtacagagctttattaacttctcgcttctccatattaagttgtctagttagttgtgcagcagtagctccttcgattccaatggttttaatagcctcacacacaatctctgcgttagaacgctcgtcgatatagattttagacatttttagagagaactaacgcaatcagtaataaaactaatttattttatcattttttttattcatcatcctctggtggttcgtcgtttctatcgaatgtagctctgattaacccgtcatctataggtgatgctggttctggagattctggaggagatggattattatctggaagaatctctgttatttccttgttttcatgtatcgattgcgttgtaacattaagattgcgaaatgctctaaatttgggaggcttaaagtgttgtttgcaatctctacacgcgtgtctaactagtggaggttcgtcagcggctctagtttgaatcatcatcggcgtagtattcctacttttacagttaggacacggtgtattgtatttctcgtcgagaacgttaaaataatcgttgtaactcacatcctttattttatctatattgtattctactcctttcttaatgcattttataccgaataagagatagcgaaggaattctttttcggtgccgctagtacccttaatcatatcacatagtgttttatattccaaatttgtggcaatagacggtttatttctatacgatagtttgtttctggaatcctttgagtattctataccaatattattctttgattcgaatttagtttcttcgatattagattttgtattacctatattcttgatgtagtactttgatgatttttccatggcccattctattaagtcttccaagttggcatcatccacatattgtgatagtaattctcggatatcagtagcggttaccgccattgatgtttgttcattggatgagtaactactaatgtatacattttccatttataacacttatgtattaactttgttcatttatattttttcattattatgttgatattaacaaaagtgaatatatatatgttaataattgtattgtggttatacggctacaattttataattagtgaaagtcagtgtccgatgatcaatgacgatagctttactctgaaaagaaagtatcaaatcgatagtgcggagtcaacaataaaaatggataagaagaggacaaagtttcagaatagagccaaaatggtaaaagaaataaatcagacaataagagcagcacaaactcattacgagacattgaaactaggatacataaaatttaagagaatgattaggactactactctagaagatatagcaccatctattccaaataatcagaaaacttataaactattctcggacatttcagccatcggcaaagcatcacggaatccaagtaagatggtatatgctctgctgctttacatgtttcccaatttgtttggagatgatcatagattcattcgttatagaatgcatccaatgagtaaaatcaaacacaagatcttctctcctttcaaacttaatcttattagaatattagtggaagaaagattctataataatgaatgcagatctaataaatggagaataattggaacacaagttgataaaatgttgatagctgaatctgataaatatacaatagatgcaaggtataacctaaaacccatgtatagaatcaagggaaaatctgaagaagataccctctttatcaaacagatggtagaacaatgtgtgacatcccaggaattggtggaaaaagtgttgaagatactgtttagagatttgttcaagagtggagaatacaaagcgtacagatacgatgatgatgtagaaaatggatttattggattggatacactaaaattaaacattgttcatgatatagttgaaccatgtatgcctgttcgtaggccagtggctaagatactgtgtaaagaaatggtaaataaatactttgagaatccgctacatattattggtaaaaatcttcaagagtgcattgactttgttagtgaataggcatttcatctttctccaatactaattcaaattgttaaattaataatggatagtataaatagttattagtgataaaatagtaaaaataattattagaataagagtgtagtatcatagataactctcttctataaaaatggattttattcgtagaaagtatcttatatacacagtagaaaataatatagattttttaaaggatgatacattaagtaaagtaaacaattttaccctcaatcatgtactagctctcaagtatctagttagcaattttcctcaacatgttattactaaggatgtattagctaataccaatttttttgttttcatacatatggtacgatgttgtaaagtgtacgaagcggttttacgacacgcatttgatgcacccacgttgtacgttaaagcattgactaagaattatttatcgtttagtaacacaatacaatcgtacaaggaaaccgtgcataaactaacacaagatgaaaaatttttagaggttgccaaatacatggacgaattaggagaacttataggcgtaaattatgacttagttcttaatccattatttcacggaggggaacccatcaaagatatggaaatcatttttttaaaactgtttaagaaaacagacttcaaagttgttaaaaaattaagtgttataagattacttatttgggcttacctaagcaagaaagatacaggcatagagtttgcggataatgatagacaagatatatatactctatttcaacaaactggtagaatcgtccatagcaatctaacagaaacgtttagagattatatctttcccggagataagactagctattgggtgtggttaaacgaaagtatagctaatgatgcggatattgttcttaatagacacgccattaccatgtatgataaaattcttagttatatatactctgagataaaacaaggacgcgttaataaaaacatgcttaagttagtttatatctttgagcctgaaaaagatatcagagaacttctgctagaaatcatatatgatattcctggagatatcctatctattattgatgcaaaaaacgacgattggaaaaaatattttattagtttttataaagctaattttattaacggtaatacatttattagtgatagaacgtttaacgaggacttattcagagttgttgttcaaatagatcccgaatatttcgataatgaacgaattatgtctttattctctacgagtgctgcggacattaaacgatttgatgagttagatattaataacagttatatatctaatataatttatgaggtgaacgatatcacattagatacaatggatgatatgaagaagtgtcaaatctttaacgaggatacgtcgtattatgttaaggaatacaatacatacctgtttttgcacgagtcggatcccatggtcatagagaacggaatactaaagaaactgtcatctataaaatccaagagtagacggctgaacttgtttagcaaaaacattttaaaatattatttagacggacaattggctcgtctaggtcttgtgttagatgattataaaggagacttgttagttaaaatgataaaccatcttaagtctgtggaggatgtatccgcattcgttcgattttctacagataaaaaccctagtattcttccatcgctaatcaaaactattttagctagttataatatttccatcatcgtcttatttcaaaggtttttaagagataatctatatcatgtagaagaattcttggataaaagcatccatctaaccaagacggataagaaatatatacttcaattgataagacacggtagatcatagaacagaccaaatatattattaataatttgtatatacatagatataattatcacatattaaaaattcacacatttttgataaatgggaactgctgcaacaattcagactcccaccaaattaatgaataaagaaaatgcagaaatgattttggaaaaaattgttgatcatatagttatgtatattagtgacgaatcaagtgattcagaaaataatcctgaatatattgattttcgtaacagatacgaagactatagatctctcattataaaaagtgatcacgagtttgtaaagctatgtaaaaatcatgcagagaaaagttctccagaaacgcaacaaatgattatcaaacacatatacgaacaatatcttattccagtatctgaagtactattaaaacctataatgtccatgggtgacataattacatataacggatgtaaagacaatgaatggatgctagaacaactctctaccctaaactttaacaatctccgcacatggaactcatgtagcataggcaatgtaacgcgtctgttttatacattttttagttatctgatgaaagataaactaaatatataagtataatcccattctaatactttaacctgatgtattagcatcttattagaatattaacctaactaaaagacataacataaaaactcattacatagttgataaaaagcggtaggatataaatattatggctgccaccgttccgcgttttgacgacgtgtacaaaaatgcacaaagaagaattctagatcaagaaacattttttagtagaggtctaagtagaccgttaatgaaaaacacatatctatttgataattacgcgtatggatggataccagaaactgcaatttggagtagtagatacgcaaacttagatgcaagtgactattatcccatttcgttgggattacttaaaaagttcgagtttctcatgtctctatataaaggtcctattccagtatacgaagaaaaagtaaatactgaattcattgctaatggatcgttctctggtagatacgtatcatatcttcgaaagttttctgctcttccaacaaacgagtttattagttttttgttactgacttccattccaatctataatatcttgttctggtttaaaaatactcagtttgatattactaaacacacattattcagatacgtctatacagataatgccaaacacctggcgttggctaggtatatgcatcaaacaggagactataagcctttgtttagtcgtctcaaagagaattatatatttaccggtcccgttccaataggtatcaaagatataaatcaccctaatcttagtagagcaagaagtccatccgattatgagacattagctaatattagtactatattgtactttaccaagtatgatccggtattaatgtttttattgttttacgtacctgggtattcaattactacaaaaattactccagccgtagaatatctaatggataaactgaatctaacaaagagcgacgtacaactgttgtaaattattttatgcttcgtaaaatgtaggttttgaaccaaacattctttcaaagaatgagatgcataaaactttattatccaatagattgactatttcggacgtcaatcgtttaaagtaaacttcgtaaaatattctttgatcactgccgagtttaaaacttctatcgataattgtttcatatgttttaatatttacaagttttttggtccatggtacattagccggacaaatatatgcaaaataatatcgttctccaagttctatagtttctggattatttttattatattcagtaaccaaatacatattagggttatctgcggatttataatttgagtgatgcattcgactcaacataaataattctagaggagacgatctactatcaaattcggatcgtaaatctgtttctaaagaacggagaatatctatacatacctgattagaattcatccgtccttcagacaacatctcagacagtctggtcttgtatgtcttaatcatattcttatgaaacttggaaacatctcttctagtttcactagtacctttattaattctctcaggtacagattttgaattcgacgatgccgagtatttcatcgttgtatatttcttcttcgattgcataatcagattcttatataccgcctcaaactctattttaaaattattaaacaatactctattattaatcagtcgttctaactcctttgctatttctatggacttatctacatcttgactgtctatctctgtaaacacggagtcggtatctccatacacgctacgaaaacgaaatctgtaatctataggcaacgatgttttcacaatcggattaatatctctatcgtccatataaaatggattacttaatggattggcaaaccgtaacataccgttagataactctgctccatttagtaccgattctagatacaagatcattctacgtcctatggatgtgcaactcttagccgaagcgtatgagtatagagcactatttctaaatcccatcagaccatatactgagttggctactatcttgtacgtatattgcatggaatcatagatggccttttcagttgaactggtagcctgttttaacatctttttatatctggctctctctgccaaaaatgttcttaatagtctaggaatggttccttctatcgatctatcgaaaattgctatttcagagatgaggttcggtagtctaggttcacaatgaaccgtaatatatctaggaggtggatatttctgaagcaagagctgattatttatttcttcttccaatctattggtactaacaacgacaccgactaatgtttccggagatagatttccaaagatacacacattaggatacagactgttataatcaaagattaatacattattactaaacattttttgttttggagcaaataccttaccgccttcataaggaaacttttgttttgtttctgatctaactaagatagttttagtttccaacaatagctttaacagtggacccttgatgactgtactcgctctatattcgaataccatggattgaggaagcacatatgttgacgcacccgcgtctgtttttgtttctactccataatactcccacaaatactgacacaaacaagcatcatgaatacagtatctagccatatctaaagctatgtttagattataatccttatacatctgagctaaatcaacgtcatcctttccgaaagataatttatatgtatcattaggtaaagtaggacataatagtacgactttaaatccattttcccaaatatctttacgaattactttacatataatatcctcatcaacagtcacataattacctgtggttaaaacctttgcaaatgcagcggctttgcctttcgcgtccgtagtatcgtcaccgatgaacgtcatttctctaactcctctatttaatactttacccatgcaactgaacgcgttcttggatatagaatccaatttgtacgaatccaatttttcagatttttgaatgaatgaatatagatcgaaaaatatagttccattattgttattaacgtgaaacgtagtattggccatgccgcctactcccttatgactagactgatttctctcataaatacagagatgtacagcttcctttttgtccggagatctaaagataatcttctctcctgttaataactctagacgattagtaatatatctcagatcaaagttatgtccgttaaaggtaacgacatagtcgaacgttagttccaacaattgtttagctattcgtaacaaaactatttcagaacataaaactagttctcgttcgtaatccatttccattagtgactgtatcctcaaacatcctctatcgacggcttcttgtatttcctgttccgttaacatctcttcattaatgagcgtaaacaataatcgtttaccacttaaatcgatataacagtaacttgtatgcgagattgggttaataaatacagaaggaaacttcttatcgaagtgacactctatatctagaaataagtacgatcttgggatatcgaatctaggtatttttttagcgaaacagttacgtggatcgtcacaatgataacatccattgttaatctttgtcaaatattgctcgtccaacgagtaacatccgtctggagatatcccgttagaaatataaaaccaactaatattgagaaattcatccatggtggcattttgtatgctgcgtttctttggctcttctatcaaccacatatctgcgacggagcattttctatctttaatatctagattataacttattgtctcgtcaatgtctatagttctcatctttcccaacggcctcgcattaaatggaggaggagacaatgactgatatatttcgtccgtcactacgtaataaaagtaatgaggaaatcgtataaatacggtctcaccatttcgacatctggatttcagatataaaaatctgttttcaccgtgactttcaaaccaattaatgcaccgaacatccatttatagaatttagaaatatattttcatttaaatgaatcccaaacattggggaagagccgtatggaccattatttttatagtactttcgcaagcgggtttagacggcaacatagaagcgtgtaaacgaaaactatatactatagttagcactcttccatgtcctgcatgtagacggcacgcgactatcgctatagaggacaataatgtcatgtctagcgatgatctgaattatatttattattttttcatcagattatttaacaatttggcatctgatcccaaatacgcgatcgatgtgacaaaggttaaccctttataaacttaacccattataaaacttatgattagtcacgactgaaataaccgcgtgattattttttggtataattctacacggcatggtttctgtgactatgaattcaacccccgttacattagtgaaatctttaacaaacagcaagggttcgtcaaagacataaaactcattgtttacaatcgaaatagaccccctatcacacttaaaataaaaaatatccttatcctttaccaccaaataaaattctgattggtcaatgtgaatgtattcacttaacagttccacaaatttatttattaactccgaggcacatacatcgtcggtattttttatggcaaactttactcttccagcatccgtttctaaaaaaatattaacgagttccatttatatcatccaatattattgaaatgacgttgatggacaaatgatacaaataagaaggtacggtacctttgtccaccatctcctccaattcatgctctattttgtcattaactttaatgtatgaaaacagtacgccacatgcttccatgacagtgtgtaacactttggatacaaaatgtttgacattagtataattgttcaagactgtcaatctataatagatagtagctataatatattctatgatggtattgaagaagatgacaaccttggcatattgatcatttaacacagacatggtatcaacagatagcttgaatgaaagagaatcagtaattggaataagcgtcttctcgatggagtgtccgtataccaacatgtctgatattttgatgtattccattaaattatttagttttttctttttattctcgttaaacagcatttctgtcaacggaccccaacatcgttgaccgattaagttttgattgatttttccgtgtaaggcgtatctagtcagatcgtatagcctatccaataatccatcgtctgtgtgtagatcacatcgtacactttttaattctctatagaagagcgacagacatctggagcaattacagacagcaatttctttattctctacagatgtaagatacttgaagacattcctatgatgatgcagaattttggataacacggtattgatggtatctgttaccataattcctttgatggctgatagtgtcagagcacaagatttccaatctttgacaatttttagcaccattatctttgttttgatatctatatcagacagcatggtgcgtctgacaacacaaggattaagacggaaagatgaaatgattctctcaacatcttcaatggataccttgctattttttctggcattatctatatgtgcgagaatatcctctagagaatcagtatcctttttgatgatagtggatctcaatgacatgggacgtctaaaccttcttattctatcaccagattgcatggtgatttgtcttctttcttttatcataatgtaatctctaaattcatcggcaaattgtctatatctaaaatcataatatgagatgtttacctctacaaatatctgttcgtccaatgttagagtatttacatcagttttgtattccaaattaaacatggcaacggatttaattttatattcctctattaagtcctcgtcgataataacagaatgtagataatcatttaatccatcgtacatggttggaagatgctcgttgacaaaatctttaattgtcttgatgaaggtgggactatatctaacatcttgattaataaaatttataacattgtccataggatactttgtaactagttttatacacatctcttcatcggtaagtttagacagaatatcgtgaacaggtggtatattatattcatcagatatacgaagaacaatgtccaaatctatattgtttaatatattatatagatgtagtgtagctcctacaggaatatctttaactaagtcaatgatttcatcaaccgttagatctattttaaagttaatcatataggcattgatttttaaaaggtatgtagccttgactacattctcattaattaaccattccaagtcactgtgtgtaagaagattatattctatcataagcttgactacatttggtcccgataccattaaagaattcttatgatataaggaaacagattttaggtactcatctactctacaagaattttggagagccttaacgatatcagtgacgtttattatttcaggaggaaaaaacctaacattgagaatatcggaattaatagcttccagatacagtgattttggcaatagtccgtgtaatccataatccagtaacacgagctggtgcttgctagacaccttttcaatgtttaatttttttgaaataagctttgataaagccttcctcgcaaattccggatacatgaacatgtcggcgacatgattaagtattgttttttcattatttttatattttctcaacaagttctcaataccccaatagatgatagaatatcacccaatgcgtccatgttgtctatttccaacaggtcgctatatccaccaatagaagttttcccaaaaaagattctaggaacagttctaccaccagtaatttgttcaaaatagtcacgcaattcattttcgggtttaaattctttaatatcgacaatttcatacgctcctcttttgaaactaaacttatttagaatatccagtgcatttctacaaaaaggacatgtatacttgacaaaaattgtcactttgttattggccaacctttgttgtacaaattcctcggccattttaatatttaagtgatataaaactatctcgacttatttaactctttagtcgagatatatggacgcagatagctatatgatagccaactacagaaggcaaacgctataaaaaacataattacgacgagcatatttataaatatttttattcagcattacttgatatagtaatattaggcacagtcaaacattcaaccactctcgatacattaactctctcattttctttaacaaattctgcaatatcttcgtaaaaagattcttgaaactttttagaatatctatcgactctagatgaaatagcgttcgtcaacatactatgttttgtatacataaaggcgcccattttaacagtttctagtgacaaaatgctagcgatcctaggatcctttagaatcacatagattgacgattcgtctctcttagtaactctagtaaaataatcatacaatctagtacgcgaaataatattatccttgacttgaggagatctaaacaatctagttttgagaacatcgataagttcatcgggaatgacatacatactatctttaatagaactcttttcatccagttgaatggattcgtccttaaccaactgattaatgagatcttctattttatcattttccagatgatatgtatgtccattaaagttaaattgtgtagcgcttctttttagtctagcagccaatactttaacatcactaatatcgatatacaaaggagatgatttatctatggtattaagaattcgtttttcgacatctgtcaaaaccaattcctttttgcctgtatcatccagttttccatcctttgtaaagaaattattttctactagactattaataagactgataaggattcctccataattgcacaatccaaactttttcacaaaactagactttacaagatctacaggaatgcgtacttcaggtttcttagcttgtgattttttcttttgtggacattttcttgtgaccaactcatctaccatttcattgattttagcagtgaaataagctttcaatgcacgggcactgatactattgaaaacgagttgatcttcaaattccgccatttaagttcaccaaacaacttttaaatacaaatatatcaatagtagtagaataagaactataaaaaaaataataattaaccaataccaaccccaacaaccggtattattagttgatgtgactgttttctcatcacttagaacagatttaacaatttctataaagtctgtcaaatcatcttccggagaccccataaatacaccaaatatagcggcgtacaacttatccatttatacattgaatattggcttttctttatcgctatcttcatcatattcatcatcaatatcaacaagtcccagattacgagccagatcttcttctacattttcagtcattgatacacgttcactatctccagagagtccgataacgttagccaccacttctctatcaatgattagtttcttgagtgcgaatgtaatttttgtttccgttccggatctatagaaaactacaggtgtgataattgccttggccaattgtctttctcttttactgagtgattctagttcaccttctatagatctgagaatggatgattctccagtcgaaacatattctaccatggctccgtttaatttgttgatgaagatggattcatccttaaatgttttctctgtaatagtttccaccgaaagactatgcaaagaatttggaatgcgttccttgtgcttaatgtttccatagacggcttctagaagttgatacaacataggactagccgcggtaacttttatttttagaaagtatccatcgcttctatcttgtttagatttatttttataaagtttagtctctccttccaacataataaaagtggaagtcatttgactagataaactatcagtaagttttatagagatagacgaacaattagcgtattgagaagcatttagtgtaacgtattcgatacattttgcattagatttactaatcgattttgcatactctataacacccgcacaagtctgtagagaatcgctagatgcagtaggtcttggtgaagtttcaactctcttcttgattaccttactcatgattaaacctaaataattgtactttgtaatataatgatatatattttcactttatctcatttgagaataaaaatgtttttgtttaaccactgcatgatgtacagatttcggaatcacaaaccaccggtggttttattttatccttgtccaatgtgaattgaatgggagcggatgcgggtttcgtacgtagatagtacattcccgtttttagaccgagactccatccgtaaaaatgcatactcgttagtttggaataactcggatctgctatatggatattcatagattgactttgatcgatgaaggctcccctgtctgcagccatttttatgatcgtcttttgtggaatttcccaaatagttttataaactcgcttaatatcttctggaaggtttgtattctgaatggatccaccatctgccataatcctattcttgatctcatcattccataattttctctcggttaaaactctaaggagatgcggattaactacttgaaattctccagacaatactctccgagtgtaaatattactggtatacggttccaccgactcattatttcccaaaatttgagcagttgatgcagtcggcataggtgccaccaataaactatttctaagaccgtatgttctgattttatcttttagaggttcccaattccaaagatccgacggtacaacattccaaagatcatattgtagaataccgttactggcgtacgatcctacatatgtatcgtatggtccttccttctcagctagttcacaactcgcctctaatgcaccgtaataaatggtttcgaagatcttcttatttagatcttgtgcttccaggctatcaaatggataatttaagagaataaacgcgtccgctaatccttgaacaccaataccgataggtctatgtctcttattagagatttcagcttctggaataggataataattaatatctataattttattgagatttctgacaattactttgaccacatccttcagtttgagaaaatcaaatcgcccatctattacaaacatgttcaaggcaacagatgccagattacaaacggctacctcattagcatccgcatattgtattatctcagtgcaaagattactacacttgatagttcctaaattttgttgattactctttttgttacacgcatccttataaagaatgaatggagtaccagtttcaatctgagattctataatcgctttccagacgactcgagcctttattatagatttgtatctcctttctctttcgtatagtgtatacaatcgttcgaactcgtctccccaaacattgtccaatccaggacattcatccggacacatcaacgaccactctccgtcatccttcactcgtttcataaagagatcaggaatccaaagagctataaatagatctctggttctatgttcctcgtttcctgtattctttttaagatcgaggaacgccataatatcagaatgccacggttccaagtatatggccataactccaggccgtttgtttcctccctgatctatgtatctagcggtgttattataaactctcaacattggaataataccgtttgatataccattggtaccggagatatagcttccactggcacgaatattactaattgatagacctattccccctgccattttagagattaatgcgcatcgttttaacgtgtcatagataccctctatgctatcatcgatcatgttaagtagaaaacagctagacatttggtgacgactagttcccgcattaaataaggtaggagaagcgtgcgtaaaccatttttcagaaagtagattgtacgtctcaatagctgagtctatatcccattgatgaattcctactgcgacacgcattaacatgtgctgaggtctttcaacgatcttgttgtttattttcaacaagtaggatttttccaaagttttaaaaccaaaatagttgtatgaaaagtctcgttcgtaaataataaccgagttgagtttatccttatatttgttaactatatccatggtgatacttgaaataatcggagaatgtttcccatttttaggattaacatagttgaataaatcctccatcacttcactaaatagtttttttgtttccttgtgtagatttgatacggctattctggcggctagaatggcataatccggatgttgtgtagtacaagtggctgctatttcggctgccagagtgtccaattctaccgttgttactccattatatattccttgaataaccttcatagctattttaataggatctatatgatccgtgtttaagccataacataattttctaatacgagacgtgattttatcaaacatgacattttccttgtatccatttcgtttaatgacaaacatttttgttggtgtaataaaaaaattatttaacttttcattaatagggatttgacgtacgtagcgtacaaaatgattgttcctggtatatagataaagagtcctatatatttgaaaatcgttacggctcgattaaactttaatgattgcatagtgaatatatcattaggatttaactccttgactatcagggcggcaccagaaattaccatcaaaagcattaatacagttatgcctatcgcagttagaacggttatagcatccaccatttatatctaaaaattagatcaaagaatatgtgacaaagtcctagttgtatattgagaattgacaaaacaatgtttcttacatattttttttttattagtaaccgacttaatagtaggaactggaaaactagacttgattattctataagtatagatacccttccaaataatattctctttgataaaagttccagaaaatgtagaattttttaaaaagttatcttttgctattaccaagattgtgtttagacgcttattattaatatgagtgatgaaatccacaccgcctctagatatcgcctttatttccacattagatggtaaatccaatagtgaaactatctttttaggaatgtatggactcgcgtttagaggagtgaacgtcttgggcgtcggaaaggatgattcgtcaaacgaataaacaatttcacaaatggatgttaatgtattagtaggaaattttttgacgctagtggaattgaaaattctaatggatgatgttctacctatttcatccgataacatgttaatttccgacaccaacggttttaatatttcgatgatatacggtagtctctctttcggacttatatagcttattccacaatacgagtcattatatactccaaaaaacaaaataactagtataaaatctgtatcgaatgggaaaaacgaaattatcgacataggtatagaatccggaacattgaacgtattaatacttaattctttttctgtggtaagtaccgataggttattgacattgtatggttttaaatattctataacttgagacttgatagatattagtgatgaattgaaaattatttttatcaccacgtgtgtttcaggatcatcgtcgacgcccgtcaaccaaccgaacggagtaaaataaatatcattaatatatgctctagatattagtatttttatcaatcctttgattatcatcttctcgtaggcgaatgattccatgatcaagagtgatttaagaacatcctccggagtattaatgggcttagtaaacagtccatcgttgcaataataaaagttatccaagttaaaggatattatgcattcgtttaaagatatcacctcatctgacggagacaattttttggtaggttttagagactttgaagctacttgtttaacaaagttattcatcgtcgtttactattctatttaattttgtagttaatttatcacatatcacattaattgactttttggtccatttttccatacgtttatattcttttaatcctgcgttatccgtttccgttatatccagtgatagatcgtgcaggttaaatagaatgctcttaaataatgtcatttttttatccgctaaaaatttaaagaatgtataaacttttttcaaagatttaaaacttttaggtggtgtcctagtacacaatatcataaacaaactaataaacatcccgcattcagattccaacagctgattaacttccacattaatacagcctattttcgctccaaatgtacattcgaaaaatctgaataaaacatcaatgtcgcaatttgtattatccaatacagaatgtttgtgattcgtgttaaaaccatcggagaaggaatagaaataaaaattattatagtggtggaattcagttggaatattgcctccggagtcataaaaggatactaaacattgttttttatcataaattacacatttccaatgagacaaataacaaaatccaaacattacaaatctagaggtagaacttttaattttgtctttaagtatatacgataagatatgtttattcataaacgcgtcaaatttttcatgaatcgctaaggagtttaagaatctcatgtcaaattgtcctatataatccacttcggatccataagcaaactgagagactaagttcttaatacttcgattgctcatccaggctcctctctcaggctctattttcatcttgacgacctttggattttcaccagtatgtattcctttacgtgataaatcatcgattttcaaatccatttgtgagaagtctatcgccttagatactttttcccgtagtcgaggtttaaagaaatacgctaacggtatactagtaggtaactcaaaaacatcatatatagaatggtaacgcgtctttaactcgtcggttaactctttcttttgatcgagttcgtcgctactattgggtctgctcaggtgccccgactctactagttccaacatcataccgataggaatacaagacactttgccggcggttgtagatttatcatatttttccactacatatccgttacaatttgttaaaaatttagatacatctatattgctacataatccagctagtgaatatatatgacataataaattggtaaatcctagttctggtattttactaattactaaatctgtatatctttccatttatcatggaaaagaatttaccagatatcttcttttttccaaactgcgttaatgtattctcttacaaatattcacaagatgaattcagtaatatgagtaaaacggaacgtgatagtttctcattggccgtgtttccagttataaaacatagatggcataacgcacacgttgtaaaacataaaggaatatacaaagttagtacagaagcacgtggaaaaaaagtatctcctccatcactaggaaaacccgcacacataaacctaaccgcgaagcaatatatatacagtgaacacacaataagctttgaatgttatagttttctaaaatgtataacaaatacagaaatcaattcgttcgatgagtatatattaagaggactattagaagctggtaatagtttacagatattttccaattccgtaggtaaacgaacagatactataggtgtactagggaataagtatccatttagcaaaattccattggcctcattaactcctaaagcacaacgagagatattttcagcgtggatttctcatagacctgtagttttaactggaggaactggagtgggtaagacgtcacaggtacccaagttattgctttggtttaattatttatttggtggattctctactctagataaaatcactaactttcacgaaagaccagtcattctatctcttcctaggatagctttagttagattgcatagcaataccattttaaaatcattgggatttaaggtactagatggatctcctatttctttacggtacggatctataccggaagaattaataaacaaacaaccaaaaaaatatggaattgtattttctacccataagttatctctaacaaaactatttagttatggcactcttattatagacgaagttcatgagcatgatcaaataggagatattattatagcagtagcgagaaagcatcatacgaaaatagattctatgtttttaatgactgccacgttagaggatgaccgagaacggctaaaagtatttttacctaatcccgcatttatacatattcctggagatacactgtttaaaattagcgaggtatttattcataataagataaatccatcttccagaatggcatacatagaagaagaaaagagaaatttagttactgctatacagatgtatactcctcctgatggatcatccggtatagtctttgtggcatccgttgcacagtgtcacgaatataaatcatatttagaaaaaagattaccgtatgatatgtatattattcatggtaaggtcttagatatagacgaaatattagaaaaagtgtattcatcacctaatgtatcgataattatttctactccttatttggaatccagcgttactatacgcaatgttacacacatttatgatatgggtaaagtttttgtccccgctccttttggaggatcgcaagaatttatttctaaatctatgagagatcaacgaaaaggaagagtaggaagagttaatcctggtacatacgtctatttctatgatctgtcttatatgaagtctatacagcgaatagattcagaatttctacataattatatattgtacgctaataagtttaatctaacactccccgaagatttgtttataatccctacaaatttggatattctatggcgtacaaaggaatatatagactcgttcgatattagtacagaaacatggaataaattattatccaattattatatgaagatgatagagtatgctaaactttatgtactaagtcctattctcgctgaggagttggataactttgagaggacgggagaattaactagtattgtacgagaagccattttatctctaaatttacgaattaagattttaaattttaaacataaagatgatgatacgtatatacacttttgtaaaatattattcggtgtctataacggaacaaacgctactatatattatcatagacctctaacgggatatatgaatatgatttcagatactatatttgttcctgtagataataactaaaaatcaaactctaatgaccacatctttttttagagatgaaaaattttctacatctccttttgtagacacgactaaacattttgcaaaaaaaagtttattagtgtttagataatcgtatacttcatcagtgtagatagtaaatgtgaacaaataaaaggtattcttactcaatagattggtaaattccatagaatatattaatcctttcttcttgagatcccacatcatttcaaccagagacgttttatccaatgatttacctcgtactataccacatacaaaactagattttgcagtgacgtcgtacctggtattcctaccaaacaaaattttacttttagttcttttagaaaattctaaggtagaatctctatttgccaatatgtcatctatggaattaccactagcaaaaaatgatagaaatatatattgatacatcgcagctggttttgatctactatactttaaaaacgaatcagattccataattgcctgtatatcatcagctgaaaaactatgttttacacgtattccttcggcatttctttttaatgatatatcttgtttagacaatgataaagttatcatgtccatgagagacgcgtctccgtatcgtataaatatttcattagatgttagacgcttcattaggggtatacttctataaggtttcttaatcagtccatcattggttgcgtcaagaactactatcggatgttgttgggtatctctagtgttacacatggccttactaaagtttgggtaaataactatgatatctctattaattatagatgcatatatttcattcgtcaaggatattagtatcgacttgctatcgtcattaatacgtgtaatgtaatcatataaatcatgcgatagccaaggaaaattcaaatagatgttcatcatataatcgtcgctataattcatattaatacgttgacattgactaatttgtaatatagcctcgccacgaagaaagctctcgtattcagtttcatcgataaaggataccgttaaatataactggttgccgatagtctcatagtctattaagtggtaagtttcgtacaaatacagaatccctaaaatattatctaatgttggattaatctttaccataactgtataaaatggagacggagtcataactattttaccgtttgtacttactggaatagacgaaggaataatctccggacatgctggtaaagacccaaatgtctgtttgaagaaatccaatgttccaggtcctaatctcttaacaaaaattacgatattcgatcccgatatcctttgcattctatttaccagcatatcacgaactatattaagattatctatcatgtctattctcccaccgttatataaatcgcctccgctaagaaacgttagtatatccatacaatggaatacttcatttctaaaatagtattcgttttctaattctttaatgtgaaatcgtatactagaaagggaaaaattatctttgagttttccgttagaaaagaaccacgaaactaatgttctgattgcgtccgattccgttgctgaattaatggatttacaccaaaaactcatataacttctagatgtagaagcattcgctaaaaaattagtagaatcaaaggatataagtagatgttccaacaagtgagcaattcccaagatttcatctatatcattctcgaatccgaaattagaaattcccaagtagatatcctttttcatccgatcgttgatgaaaatacgaactttattcggtaagacaatcatttactaaggagtaaaataggaagtaatgttcgtatgtcgttatcatcgtataaattaaaggtgtgttttttaccattaagtgacattataattttaccaatattggaattataatataggtgtatttgcgcactcgcgacggttgatgcatcggtaaatatagctgtatctaatgttctagtcggtatttcatcatttcgctgtctaataatagcgttttctctatctgtttccattacagctgcctgaagtttattggtcggataatatgtaaaataataagaaatacatacgaataacaaaaataaaataagatataataaagatgccatttagagatctaattttgttcaacttgtccaaattcctacttacagaagatgaggaatcgttggagatagtgtcttccttatgtagaggatttgaaatatcttatgatgacttgataacttactttccagataggaaataccataaatatatttctaaagtatttgaacatgtagatttatcggaggaattaagtatggaattccatgatacaactttgcgagatttagtctatcttagattgtacaagtattccaagtgtatacggccgtgttataaattaggagataatctaaaaggcatagttgttataaaggacaggaatatttatattagggaagcaaatgatgacttgatagaatatctcctcaaggaatacactcctcagatttatacatattctaatgagcgcgtccccataactggttcaaaattaattctttgtggattttctcaagttacatttatggcgtatacaacgtcgcatataacaacaaataaaaaggtagatgttctcgtttccaaaaaatgtatagatgaactagtcgatccaataaattatcaaatacttcaaaatttatttgataaaggaagcggaacaataaacaaaatactcaggaagatattttattcggtaacaggtggccaaactccataggtagctttttctatttcggattttagaatttccaaattcaccagcgatttatctgttttggtgaaatccaaggatttattaatgtccacaaatgccatttgttttgtctgtggattgtatttgaaaatggaaacgatgtagttagatagatgcgctgcgaagtttcctattagggttccgcgcttcacgtcacccagcatacttgaatcaccatcctttaaaaaaaatgataagatatcaacatggagtatatcatactcggattttaattcttctactgcatcactgacattttcacaaatactacaatacggtttaccgaaaataatcagtacgttcttcatttatgggtatcaaaaacttaaaatcgttactgctggaaaataaatcactgacgatattagatgataatttatacaaagtatacaatggaatatttgtggatacaatgagtatttatatagccgtcgccaattgtgtcagaaacttagaagagttaactacggtattcataaaatacgtaaacggatgggtaaaaaagggagggcatgtaaccctttttatcgatagaggaagtataaaaattaaacaagacgttagagacaagagacgtaaatattctaaattaaccaaggacagaaaaatgctagaattagaaaagtgtacatccgaaatacaaaatgttaccggatttatggaagaagaaataaaggcagaaatgcaattaaaaatcgataaactcacatttcaaatatatttatctgattctgataacataaaaatatcattgaatgagatactaacacatttcaacaataatgagaatgttacattattttattgtgatgaacgagacgcagaattcgttatgtgtctcgaggctaaaacacatttctctaccacaggagaatggccgttgataataagtaccgatcaggatactatgctatttgcatctgctgataatcatcctaagatgataaaaaacttaactcaactgtttaaatatgttccatctgcagaggataactatttagcaaaattaacggcgttagtgaatggatgtgatttctttcctggactctatggggcatctataacacccaacaacttaaacaaaatacaattgtttagtgattttacaatcgataatatagtcactagtttggcaattaaaaattattatagaaagactaactctaccgtagacgtgcgtaatattgttacgtttataaacgattacgctaatttagacgatgtctactcgtatattcctccttgtcaatgcactgttcaagaatttatattttccgcattagatgaaaaatggaatgaatttaaatcatcttatttagaaagcgtgccgttaccctgccaattaatgtatgcgttagaaccacgcaaggagattgatgtttcagaagttaaaactttatcatcttatatagatttcgaaaatactaaatcagatatcgatgttataaaatctatatcctcgatcttcggatattctaacgaaaactgtaacacgatagtattcggcatctataaggataatttactactgagtataaatagttcattttactttaacgatagtctgttaataaccaatactaaaagtgataatataataaatataggttactagattaaaaatggtgttccaactcgtgtgctctacgtgcggcaaagatatttctcacgaacgatataaattgattatacgaaaaaaatcattaaaggatgtactcgtcagtgtaaagaacgaatgttgtaggttaaaattatctacacaaatagaacctcaacgtaacttaacagtgcaacctctattggatataaactaatatggatccggttaattttatcaagacatatgcgcctagaggttctattatttttattaattataccatgtcattaacaagtcatttgaatccatcgatagaaaaacatgtgggtatttattatggtacgttattatcggaacacttggtagttgaatcaacatatagaaaaggagttcgaatagtcccattggatagtttttttgaaggatatcttagtgcaaaagtatacatgttagagaatattcaagttatgaaaatagcagctgatacgtcattaactttattgggtattccgtatggatttggtcatgatagaatgtattgttttaaattggtagctgactgttataaaaatgccggtattgatacatcgtctaaacgaatattaggtaaagatatttttctgagccaaaacttcacagacgataatagatggataaagatatatgattctaataatttaacattttggcaaattgattaccttaaagggtgagttaatatgcataactactcctccgttgttttttccctcgttctttttcttaacgttgtttgccatcactctcataatgtaaagatattctaaaatggtaaacttttgcatatcggacgcagaaattggtataaatgttgtaattgtattatttcccgtcaatggactagtcacagctccatcagttttatatcctttagagtatttctcactcgtgtctaacattctagagcattccatgatctgtttatcgttgatattggccggaaagatagattttttattttttattatattactattggcaattgtagatataacttctggtaaatatttttctaccttttcaatctcttctattttcaagccggctatatattctgctatattgttgctagtatcaataccttttctggctaagaagtcatatgtggtattcactatatcagttttaactggtagttccattagcctttccacttctgcagaataatcagaaattggttctttaccagaaaatccagctactataataggctcaccgatgatcattggcaaaatcctatattgtaccagattaatgagagcatatttcatttccaataattctgctagttcttgagacattgatttatttgatgaatctagttggttctctagatactctaccatttctgccgcatacaataacttgttagataaaatcagggttatcaaagtgtttagcgtggctagaatagtgggcttgcatgtattaaagaatgcggtagtatgagtaaaccgttttaacgaattatatagtctccagaaatctgtggcgttacatacatgagccgaatgacatcgaagattgtccaatatttttaatagctgctctttgtccattatttctatatttgactcgcaacaattgtagataccattaatcaccgattcctttttcgatgccggacaatagcacaattgtttagctttggactctatgtattcagaattaatagatatatctcttaatacagattgcactatacattttgaaactatgtcaaaaattgtagaacgacgctgttctgcagccatttaactttaaataatttacaaaaatttaaaatgagcatccgtataaaaatcgataaactgcgccaaattgtggcatatttttcagagttcagtgaagaagtatctataaatgtagactcgacggatgagttaatgtatatttttgccgccttgggcggatctgtaaacatttgggccattatacctctcagtgcatcagtgttctaccgcggagccgaaaatattgtgtttaatcttcctgtgtccaaggtaaaatcgtgtttgtgtagttttcacaatgatgccatcatagatatagaacctgatctggaaaataatctagtaaaactttctagttatcatgtagtaagtgtcgattgtaataaggaactgatgcctattaggacagatactactatttgtctaagtatagatcaaaagaaatcttacgtgtttaattttcacaagtatgaagaaaaatgttgtggtagaaccgtcattcatttagaatggttgttgggctttatcaagtgtattagtcagcatcagcatttggctattatgtttaaagatgacaatattattatgaagactcctggtaatactgatgcattttccagggaatattctatgactgaatgttctcaagaactacaaaagttttctttcaaaatagctatctcgtctctcaacaaactacgaggattcaaaaagagagtcaatgtttttgaaactagaatcgtaatggataatgacgataacattttaggaatgttgttttcggatagagttcaatcctttaagatcaacatctttatggcgtttttagattaatactttcaatgagataaatatgggtggcggagtaagtgttgagctccctaaacgggatccgcctccgggagtacccactgatgagatgttattaaacgtggataaaatgcatgacgtgatagctcccgctaagcttttagaatatgtgcatataggaccactagcaaaagataaagaggataaagtaaagaaaagatatccagagtttagattagtcaacacaggacccggtggtctttcggcattgttaagacaatcgtataatggaaccgcacccaattgctgtcgcacttttaatcgtactcattattggaagaaggatggaaagatatcagataagtatgaagagggtgcagtattagaatcgtgttggccagacgttcacgacaccggaaaatgcgatgttgatttattcgactggtgtcagggggatacgttcgatagaaacatatgccatcagtggatcggttcagcctttaataggagtaatagaactgtagagggtcaacaatcgttaataaatctgtataataagatgcaaacattatgtagtaaagatgctagtgtaccaatatgtgaatcatttttgcatcatttacgcgcacacaatacagaagatagcaaagagatgatcgattatattctaagacaacagtctgcggactttaaacagaaatatatgagatgtagttatcccactagagataagttagaagagtcattaaaatatgcggaacctcgagaatgttgggatccagagtgttcgaatgccaatgttaatttcttgctaacacgtaattataataatttaggactttgcaatattgtacgatgtaatactagcgtgaacaacttacagatggataaaacttcctcattaagattgtcatgtggattaagcaatagtgatagattttctactgttcccgtcaatagagcaaaagtagttcaacataatattaaacactcgttcgacctaaaattgcatttgatcagtttattatctctcttggtaatatggatactaattgtagctatttaaatgggtgccgcggcaagcatacagacgacggtgaatacactcagcgaacgtatctcgtctaaattagaacaagaagcgaatgctagtgctcaaacaaaatgtgatatagaaatcggaaatttttatatccgacaaaaccatggatgtaacctcactgttaaaaatatgtgctctgcggacgcggatgctcagttggatgctgtgttatcagccgctacagaaacatatagtggattaacaccggaacaaaaagcatacgtgccagctatgtttactgctgcgttaaacattcagacgagtgtaaacactgttgttagagattttgaaaattatgtgaaacagacttgtaattctagcgcggtcgtcgataacaaattaaagatacaaaacgtaatcatagatgaatgttacggagccccaggatctccaacaaatttggaatttattaatacaggatctagcaaaggaaattgtgccattaaggcgttgatgcaattgacgactaaggccactactcaaatagcacctaaacaagttgctggtacaggagttcagttttatatgattgttatcggtgttataatattggcagcgttgtttatgtactatgccaagcgtatgttgttcacatccaccaatgataaaatcaaacttattttagccaataaggaaaacgtccattggactacttacatggacacattctttagaacttctccgatggttattgctaccacggatatgcaaaactgaaaatatattgataatattttaatagattaacatggaagttatcactgatcgtctagacgatatagtgaaacaaaatatagcggatgaaaaatttgtagattttgttatacacggtctagagcatcaatgtcctgctatacttcgaccattaattaggttgtttattgatatactattatttgttatagtaatttatatttttacggtacgtctagtaagtagaaattatcaaatgttgttggcgttggtggcgctagtcatcacattaactattttttattactttatactataatagtactagactgacttctaacaaacatctcacctgccataaataaatgcttgatattaaagtcttctatttctaacactattccatctgtggaaaataatactctgacattatcgctaattgacacatcggtgagtgatatgcctataaagtaataatcttctttgggcacatataccagtgtaccaggttctaacaacctatttactggtgctcctatagcatactttttctttaccttgagaatatccatcgtttgcttggtcaatagcgatatgtgattttttatcaaccactcgaaaaagtaattggagtgttcatatcctctacgggctattgtctcatggccgtgtatgaaatttaagtaacacgactgtggtagatttgttctatagagccggttgccgcaaatagatagaactaccaatatgtctgtacaaatgttaaacattaattgattaacagaaaaaacaatgttcgttctgggaatagaaaccagatcaaaacaaaattcgttagaatatatgccacgtttatacattgaatataaaataactacagtttgaaaaataacagtatcatttaaacatttaacttgcggggttaatctcacaactttactgtttttgaactgttcaaaatatagcatagatccgtgagaaatacgtttagccgcctttaatagaggaaatcccaccgcctttctggatctcaccaacgacgatagttctgaccagcaactcatttcttcatcatccacctgttttaacatataataggcaggagatagatatccgtcattgcaatattccttctcgtaggcacacaatctaatattgataaaatctccattctcttctctgcatttattatcttgtttcggtggctgattaggctgtagtcttggtttaggctttggtatatcgttgttgaatctattttggtcattaaatctttcatttcttcctggtatatttttatcacctcgtttggttggatttttgtctatattatcgtttgtaacatcggtacgggtattcatttatcacaaaaaaaacttctctaaatgagtctactgctagaaaacctcatcgaagaagataccatattttttgcaggaagtatatctgagtatgatgatttacaaatggttattgccggcgcaaaatccaaatttccaagatctatgctttctatttttaatatagtacctagaacgatgtcaaaatatgagttggagttgattcataacgaaaatatcacaggagcaatgtttaccacaatgtataatataagaaacaatttgggtctaggagatgataaactaactattgaagccattgaaaactatttcttggatcctaacaatgaagttatgcctcttattattaataatacggatatgactgccgtcattcctaaaaaaagtggtaggagaaagaataagaacatggttatcttccgtcaaggatcatcacctatcttgtgtattttcgaaactcgtaaaaagattaatatttataaagaaaatatggaatccgcgtcgactgagtatacacctatcggagacaacaaggctttgatatctaaatatgcgggaattaatatcctaaatgtgtattctccttccacatccataagattgaatgccatttacggattcaccaataaaaataaactagagaaacttagtactaataaggaactagaatcgtatagttctagccctcttcaagaacccattaggttaaatgattttctgggactattggaatgtgttaaaaagaatattcctctaacagatattccgacaaaggattgattactataaatggagaatgttcctaatgtatactttaatcctgtgtttatagagcccacgtttaaacattctttattaagtgtttataaacacagattaatagttttatttgaagtattcgttgtattcattctaatatatgtattttttagatctgaattaaatatgttcttcatgcctaaacgaaaaatacccgatcctattgatagattacgacgtgctaatctagcgtgtgaagacgataaattaatgatctatggattaccatggatgacaactcaaacatctgcgttatcaataaatagtaaaccgatagtgtataaagattgtgcaaagcttttgcgatcaataaatggatcacaaccagtatctcttaacgatgttcttcgcagatgatgattcattttttaagtatttggctagtcaagatgatgaatcttcattatctgatatattgcaaatcactcaatatctagactttctgttattattattgatccaatcaaaaaataaattagaagccgtgggtcattgttatgaatctctttcagaggaatacagacaattgacaaaattcacagactttcaagattttaaaaaactgtttaacaaggtccctattgttacagatggaagggtcaaacttaataaaggatatttgttcgactttgtgattagtttgatgcgattcaaaaaagaatcctctctagctaccaccgcaatagatcctgttagatacatagatcctcgtcgtgatatcgcattttctaacgtgatggatatattaaagtcgaataaagtgaacaataattaattctttattgtcatcatgaacggcggacatattcagttgataatcggccccatgttttcaggtaaaagtacagaattaattagacgagttagacgttatcaaatagctcaatataaatgcgtgactataaaatattctaacgataatagatacggaacgggactatggacgcatgataagaataattttgaagcattggaagcaactaaactatgtgatgtcttggaatcaattacagatttctccgtgataggtatcgatgaaggacagttctttccagacattgtttaattctgtgagcgtatggcaaacggtaccgagctcttttttttttttttttttttggcatataaataagtcgactccctatcagtgatagagaatggtgaagcgtgagaaaaatgtcatctatggccctgagcctctccatcctttggaggatttgactgccggcgaaatgctgtttcgtgctctccgcaagcactctcatttgcctcaagccttggtcgatgtggtcggcgatgaatctttgagctacaaggagttttttgaggcaaccgtcttgctggctcagtccctccacaattgtggctacaagatgaacgacgtcgttagtatctgtgctgaaaacaatacccgtttcttcattccagtcatcgccgcatggtatatcggtatgatcgtggctccagtcaacgagagctacattcccgacgaactgtgtaaagtcatgggtatctctaagccacagattgtcttcaccactaagaatattctgaacaaagtcctggaagtccaaagccgcaccaactttattaagcgtatcatcatcttggacactgtggagaatattcacggttgcgaatctttgcctaatttcatctctcgctattcagacggcaacatcgcaaactttaaaccactccacttcgaccctgtggaacaagttgcagccattctgtgtagcagcggtactactggactcccaaagggagtcatgcagacccatcaaaacatttgcgtgcgtctgatccatgctctcgatccacgcgtgggcactcagctgattcctggtgtcaccgtcttggtctacttgcctttcttccatgctttcggctttagcattactttgggttactttatggtcggtctccgcgtgattatgttccgccgttttgatcaggaggctttcttgaaagccatccaagattatgaagtccgcagtgtcatcaacgtgcctagcgtgatcctgtttttgtctaagagcccactcgtggacaagtacgacttgtcttcactgcgtgaattgtgttgcggtgccgctccactggctaaggaggtcgctgaagtggccgccaaacgcttgaatcttccagggattcgttgtggcttcggcctcaccgaatctaccagcgctaacattcactctctcggggatgagtttaagagcggctctttgggccgtgtcactccactcatggctgctaagatcgctgatcgcgaaactggtaaggctttgggcccgaaccaagtgggcgagctgtgtatcaaaggccctatggtgagcaagggttatgtcaataacgttgaagctaccaaggaggccatcgacgacgacggctggttgcattctggtgattttggatattacgacgaagatgagcatttttacgtcgtggatcgttacaaggagctgatcaaatacaagggtagccaggttgctccagctgagttggaggagattctgttgaaaaatccatgcattcgcgatgtcgctgtggtcggcattcctgatctggaggccggcgaactgccttctgctttcgttgtcaagcagcctggtaaagaaattaccgccaaagaagtgtatgattacctggctgaacgtgtgagccatactaagtacttgcgtggcggcgtgcgttttgttgactccatccctcgtaacgtaacaggcaaaattacccgcaaggagctgttgaaacaattgttggagaaggccggcggtggttccggagccacgaacttctctctgttaaagcaagcaggagacgtggaagaaaaccccggtcccatggcctcctccgaggacgtcatcaaggagttcatgcgcttcaaggtgcgcatggagggctccgtgaacggccacgagttcgagatcgagggagagggcgagggccgcccctacgagggcacccagaccgccaagctgaaggtgaccaagggcggccccctgcccttcgcctgggacatcctgtcccctcagttccagtacggctccaaggcctacgtgaagcaccccgccgacatccccgactacttgaagctgtccttccccgagggcttcaagtgggagcgcgtgatgaacttcgaggacggcggcgtggtgaccgtgacccaggactcctccctgcaggacggcgagttcatctacaaggtgaagctgcgcggcaccaacttcccctccgacggccccgtaatgcagaagaagaccatgggctgggaggcctccaccgagcggatgtaccccgaggacggcgccctgaagggcgagatcaagatgaggctgaagctgaaggacggcggccactacgacgccgaggtcaagaccacctacatggccaagaagcccgtgcagctgcccggcgcctacaagaccgacatcaagctggacatcacctcccacaacgaggactacaccatcgtggaacagtacgagcgcgccgagggccgccactccaccggcgcctaattaattaatttttatcgatctaattcaacaatgtctggagagctcggatccttctgtgagcgtatggcaaacgaaggaaaaatagttatagtagccgcactcgatgggacatttcaacgtaaaccgtttaataatattttgaatcttattccattatctgaaatggtggtaaaactaactgctgtgtgtatgaaatgctttaaggaggcttccttttctaaacgattgggtgaggaaaccgagatagagataataggaggtaatgatatgtatcaatcggtgtgtagaaagtgttacgtcggctcataatattatattttttatctaaaaaactaaaaataaacattgattaaattttaatataatacttaaaaatggatgttgtgtcgttagataaaccgtttatgtattttgaggaaattgataatgagttagattacgaaccagaaagtgcaaatgaggtcgcaaaaaaactgccgtatcaaggacagttaaaactattactaggagaattattttttcttagtaagttacagcgacacggtatattagatggtgccaccgtagtgtatataggatctgctcccggtacacatatacgttatttgagagatcatttctataatttaggagtgatcatcaaatggatgctaattgacggccgccatcatgatcctattttaaatggattgcgtgatgtgactctagtgactcggttcgttgatgaggaatatctacgatccatcaaaaaacaactgcatccttctaagattattttaatttctgatgtgagatccaaacgaggaggaaatgaacctagtacggcggatttactaagtaattacgctctacaaaatgtcatgattagtattttaaaccccgtggcgtctagtcttaaatggagatgcccgtttccagatcaatggatcaaggacttttatatcccacacggtaataaaatgttacaaccttttgctccttcatattcagctgaaatgagattattaagtatttataccggtgagaacatgagactgactcgagttaccaaatcagacgctgtaaattatgaaaaaaagatgtactaccttaataagatcgtccgtaacaaagtagttgttaactttgattatcctaatcaggaatatgactattttcacatgtactttatgctgaggaccgtgtactgcaataaaacatttcctactactaaagcaaaggtactatttctacaacaatctatatttcgtttcttaaatattccaacaacatcaactgaaaaagttagtcatgaaccaatacaacgtaaaatatctagcaaaaattctatgtctaaaaacagaaatagcaagagatccgtacgcagtaataaatagaaacgtactactgagatatactaccgatatagagtataatgatttagttactttaataaccgttagacataaaattgattctatgaaaactgtgtttcaggtatttaacgaatcatccataaattatactccggttgatgatgattatggagaaccaatcattataacatcgtatcttcaaaaaggtcataacaagtttcctgtaaattttctatacatagatgtggtaatatctgacttatttcctagctttgttagactagatactacagaaactaatatagttaatagtgtactacaaacaggcgatggtaaaaagactcttcgtcttcccaaaatgttagagacggaaatagttgtcaagattctctatcgccctaatataccattaaaaattgttagatttttccgcaataacatggtaactggagtagagatagccgatagatctgttatttcagtcgctgattaatcaattagtagagatgagataagaacattataataatcaataatatatcttatatctcgtttagaaaaatgctaatattaaaatagctaacgctagtaatccaatcggaagccatttgatatctataatagggtatctaatttcctgattcagatagcggacagctatattctcggtagctactcgtttggaatcacaaacattatttacatctaatttactatctgtaatggaaacgtttcccaatgaaatggtacaatccgatacattgcattttgttatatttttttttaaagaggctggtaacaacgcatcgcttcgtttacatggctcgtaccaacaataatagggtaatcttgtatctattcctatccgtactatgcttttatcaggataaatacatttacatcgtatatcgtctttgttagcatcacagaatgcataaatttgttcgtccgtcatgataaaaatttaaagtgtaaatataactattatttttatagttgtaataaaaagggaaatttgattgtataccttcggttctttaaaagaaactgacttgataaaaatggctgtaatctctaaggttacgtatagtctatatgatcaaaaagagattaatgctacagatattatcattagtcatgttaaaaatgacgacgatatcggtaccgttaaagatggtagactaggtgctatggatggggcattatgtaagacttgtgggaaaacggaattggaatgtttcggtcactggggtaaagtaagtatttataaaactcatatagttaagcctgaatttatttcagaaattattcgtttactgaatcatatatgtattcactgcggattattgcgttcacgagaaccgtattccgacgatattaacctaaaagagttatcgggacacgctcttaggagattaaaggataaaatattatccaagaaaaagtcatgttggaacagtgaatgtatgcaaccgtatcaaaaaattactttttcaaagaaaaaggtttgtttcgtcaacaagttggatgatattaacgttcctaattctctcatctatcaaaagttaatttctattcatgaaaagttttggccattattagaaattcatcaatatccagctaacttattttatacagactactttcccatccctccgttgattattagaccggctattagtttttggatagatagtatacccaaagaaaccaatgaattaacttacttattaggtatgatcgttaagaattgtaacttgaatgctgatgaacaggttatccagaaggcggtaatagaatacgatgatattaaaattatttctaataacacttccagtatcaatttatcatatattacatccggcaaaaataatatgattagaagttatatcgtcgcccgacgaaaagatcagacggctagatctgtaattggtcccagtacatctatcaccgttaatgaggtaggaatgcccgcatatattagaaatacacttacagaaaagatatttgttaatgcctttacagtggataaagttaaacaactattagcatcaaaccaagttaaattttactttaataaacgattaaaccaattaacaagaatacgccaaggaaagtttatcaaaaataaaatacatttattgcctggtgattgggtagaagtagctgttcaagaatatacaagtattatttttggaagacagccgtctctacatagatacaacgtcatcgcttcatctatcagagctaccgaaggagatactatcaaaatatctcccggaattgccaactctcaaaatgctgatttcgacggagatgaagaatggatgatattagaacaaaatcctaaagctgtaattgaacaaagtattcttatgtatccgacgacgttactcaaacacgatattcatggagcccccgtttatggatctattcaagatgaaatcgtagcagcgtattcattgtttaggatacaagatctttgtttagatgaagtattgaacatcttggggaaatatggaagagagttcgatcctaaaggtaaatgtaaattcagcggtaaagatatctatacttacttgataggtgaaaagattaattatccgggtctcttaaaggatggtgaaattattgcaaacgacgtagatagtaattttgttgtggctatgaggcatctgtcattggctggactcttatccgatcataagtcgaacgtggaaggtatcaactttattatcaagtcatcttatgtttttaagagatatctatctatttacggttttggggtgacattcaaagatctgagaccaaattcgacgttcactaataaattggaggccatcaacgtagaaaaaatagaacttatcaaagaagcatacgccaaatatctcaacgatgtaagagacgggaaaatagttccattatctaaagctttagaggcggactatgtggaatccatgttatccaacttgacaaatcttaatatccgagagatagaagaacatatgagacaaacgctgatagatgatccagataataacctcctgaaaatggccaaagcgggttataaagtaaatcctacagaactaatgtatattctaggtacgtatggacaacaaaggattgatggtgaaccagcagagactcgagtattgggtagagtcttaccttactatcttccagactctaaggatccagaaggaagaggttacattcttaattctttaacaaaaggattaacaggttctcaatattacttttcgatgctggttgcaagatctcaatctactgatatcgtctgtgaaacatcacgtaccggaacactggctagaaaaatcattaaaaagatggaggatatggtggtcgacggatacggacaagtagttataggtaatacgctcatcaagtacgccgccaattataccaaaattctaggctcagtatgtaaacctgtagatcttatctatccagatgagtccatgacttggtatttggaaattagtgctctgtggaataaaataaaacagggattcgtttactctcagaaacagaaacttgcaaagaagacattggcgccgtttaatttcctagtattcgtcaaacccaccactgaggataatgctattaaggttaaggatctgtacgatatgattcataacgtcattgatgatgtgagagagaaatacttctttacggtatctaatatagattttatggagtatatattcttgacgcatcttaatccttctagaattagaattacaaaagaaacggctatcactatctttgaaaagttctatgaaaaactcaattatactctaggtggtggaactcctattggaattatttctgcacaggtattgtctgagaagtttacacaacaagccctgtccagttttcacactactgaaaaaagtggtgccgtcaaacaaaaacttggtttcaacgagtttaataacttgactaatttgagtaagaataagaccgaaattatcactctggtatccgatgatatctctaaacttcaatctgttaagattaatttcgaatttgtatgtttgggagaattaaatccagacatcactcttcgaaaagaaacagataggtatgtagtagatataatagtcaatagattatacatcaagagagcagaaattaccgaattagtcgtcgaatatatgattgaacgattcatctcctttagcgtcattgtaaaggaatggggtatggaaacattcattgaggacgaggataatattagatttactgtctatctaaatttcgttgaaccagaggaattgaatcttagtaagtttatgatggttcttccgggggcagccaacaagggaaagattagtaaattcaagattcctatctctgattatacgggttatgacgacttcaatcaaacaaaaaagctcaataagatgactgtagaactcatgaatctaaaagaattaggttctttcgatttggaaaacgtcaacgtgtatcctggagtatggaatacatacgatatcttcggtatcgaggccgctcgtgaatacttgtgcgaagccatgttaaacacctatggagaagggttcgattatctgtatcagccttgtgatcttctcgctagtttactatgtgctagttacgaaccagaatcagtgaataaattcaagttcggcgcagctagtactcttaagagagctacgttcggagacaataaagcattgttaaacgcggctcttcataaaaagtcagaacctattaacgataatagtagctgccacttttttagcaaggtccctaatataggaactggatattacaaatactttatcgacttgggtcttctcatgagaatggaaaggaaactatctgataagatatcttctcaaaagatcaaggaaatggaagaaacagaagacttttaattcttatcaataacatatttttctatgatctgtcttttaaacgatggattttccacaaatgcgcctctcaagtccctcatagaatgatacacgtataaaaaatatagcataggcaatgactccttatttttagacattagatatgccaaaatcatagccccgcttctatttactcccgcagcacaatgaaccaacacgggctcgtttcgttgatcacatttagataaaaaggcggttacgtcgtcaaaatatttactaatatcggtagttgtatcatctaccaacggtatatgaataatattaatattagagttaggtaatgtatatttatccatcgtcaaatttaaaacatatttgaacttaacttcagatgatggtgcatccatagcatttttataatttcccaaatacacattattggttacccttgtcattatagtgggagatttggctctgtgcatatctccagttgaacgtagtagtaagtatttatacaaacttttcttatccatttataacgtacaaatggataaaactactttatcggtaaacgcgtgtaatttagaatacgttagagaaaaggctatagtaggcgtacaagcagccaaaacatcaacacttatattctttgttattatattggcaattagtgcgctattactctggtttcagacgtctgataatccagtctttaatgaattaacgagatatatgcgaattaaaaatacggttaacgattggaaatcattaacggatagcaaaacaaaattagaaagtgatagaggtagacttctagccgctggtaaggatgatatattcgaattcaaatgtgtggatttcggcgcctattttatagctatgcgattggataagaaaacatatctgccgcaagctattaggcgaggtactggagacgcgtggatggttaaaaaggcggcaaaggtcgatccatctgctcaacaattttgtcagtatttgataaaacacaagtctaataatgttattacttgtggtaatgagatgttaaatgaattaggttatagcggttattttatgtcaccgcattggtgttccgattttagtaatatggaatagtgttagataaatgcggtaacgaatgttcctgtaaggaaccataacagtttagatttaacgttaaagatgagcataaacataataaacaaaattacaatcaaacctataacattaatatcaaacaatccaaaaaatgaaatcagtggagtagtaaacgcgtacataactcctggataacgtttagtagctgccgttcctattctagaccaaaaattcggtttcatgttttcgaaacggtgttctgcaacaagtcggggatcgtgttctacatatttggcggcattatccagtatctgcctattgatcttcatttcgttttcaattctggctatttcaaaataaaatcccgatgatagacctccagactttataatttcatctacgatgttcagcgccgtagtaactctaataatataggctgataagctaacatcataccctcctgtatatgtgaatatggcatgatttttgtccattacaagctcggttttaactttattgcctgtaataatttctctcatctgtaggatatctatttttttgtcatgcattgccttcaagacgggacgaagaaacgtaatatcctcaataacgttatcgttttctacaataactacatattctacctttttattttctaactcggtaaaaaaattagaatcccatagggctaaatgtctagcgatatttcttttcgtttcctctgtacacatagtgttacaaaaccctgaaaagaagtgagtatacttgtcatcatttctaatgtttcctccagtccactgtataaacgcataatccttgtaatgatctggatcatccttgactaccacaacatttcttttttctggcataacttcgttgtcctttacatcatcgaacttctgatcattaatatgctcatgaacattaggaaatgtttctgatggaagtctatcaataactggcacaacaataacaggagttttcgccgccgccatttagttattgaaattaatcatatacaactctttaatacgagttatattttcgtctatccattgtttcacatttacatatttcgacaaaaagatataaaatgcgtattccaatgcttctctgtttaatgaattactaaaatatacaaacacgtcactgtctggcaataaatgatatcttagaatattgtaacaatttattttgtattgcacatgttcgtgatctatgagttcttcttcgaatggcataggatctccgaatctgaaaacgtataaataggagttagaataataatatttgagagtattggtaatatataaactctttagcggtataattagtttttttctctcaatttctatttttagatgtgatggaaaaatgactaattttgtagcattagtatcatgaactctaatcaaaatcttaatatcttcgtcacacgttagctctttgaagtttttaagagatgcatcagttggttcgaccgatggagtaggtgcaacaattttttgttcgatgtatgtatgtactggagccattgttttaactataatggtgcttgtatcgaaaaactttaatgcagatagcggaagctcttcgccgcgactttctacatcgtaattgggttctaacgccgatctctgaatggatactagttttctaagttctaatgtgattctctgaaaatgtaaatccaattcctccggcattatagatgtgtatacatcggtaaataaaactatagtatccaacgatcccttctcgcaaattctagtcttaaccaaaaaatcgtatataaccacggagatggcgtatttaagagtggattcttctaccgttttgttcttggatgtcatataggaaactataaagtccgcactactgttaagaatgattactaacgcaactatatagttcaaattaagcattttggaaacataaaataactctgtagacgatacttgactttcgaataagtttgcagacaaacgaagaaagaacagacctctcttaatttcagaagaaaactttttttcgtattcctgacgtctagagtttatatcaataagaaagttaagaattagtcggttaatgttgtatttcattacccaagtttgagatttcataatattatcaaaagacatgataatattaaagataaagcgctgactatgaacgaaatagctatatggttcgctcaaaaatatagtcttgttaaacgtggaaacgataactgtatttttaatcacgtcagcggcatctaaattaaatataggtatatttattccacacactctacaatatgccacaccatcttcataataaataaattcgttagcaaaattattaattttagtgaaatagttagcgtcaactttcatagcttccttcaatctaatttgatgctcacacggtgcgaattccactctaacatcccttttccatgcctcaggttcatcgatctctataatatctagttttttgcgtttcacaaacacaggctcgtctctcgcgatgagatctgtatagtaactatgtaaatgataactagatagaaagatgtagctatatagatgacgatcctttaagagaggtataataactttaccccaatcagatagactgttgttatggtcttcggaaaaagaatttttataaatttttccagtattttccaaatatacgtacttaacatctaaaaaatccttaatgataataggaatggataatccgtctattttataaagaaatacatatcgcacattatacttttttttggaaatgggaataccgatgtgtctacataaatatgcaaagtctaaatattttttagagaatcttaattggtccaaattcttttccaagtacggtaatagatttttcatattgaacggtatcttcttaatctctggttctagttccgcattaaatgatgaaactaagtcactatttttataactaacgattacatcacctctaacatcatcatttaccagaatactgatcttcttttgtcgtaaatacatgtctaatgtgttaaaaaaaagatcatacaagttatacgtcatttcatctgtggtattcttgtcattgaaggataaactcgtactaatctcttctttaacagcctgttcaaatttatatcctatatacgaaaaaatagcaaccagtgtttgatcatccgcgtcaatattctgttctatcgtagtgtataacaatcgtatatcttcttctgtgatagtcgatacgttataaaggttgataacgaaaatatttttatttcgtgaaataaagtcatcgtaggattttggacttatattcgcgtctagtagatatgcttttatttttggaatgatctcaattagaatagtctctttagagtccatttaaagttacaaacaactaggaaattggtttatgatgtataatttttttagtttttatagattctttattctatacttaaaaaatgaaaataaatacaaaggttcttgagggttgtgttaaattgaaagcgagaaataatcataaattatttcattatcgcgatatccgttaagtttgtatcgtaatggcgtggtcaattacaaataaagcggatactagtagcttcacaaagatggctgaaatcagagctcatctaaaaaatagcgctgaaaataaagataaaaacgaggatattttcccggaagatgtaataattccatctactaagcccaaaaccaaacgagccactactcctcgtaaaccagcggctactaaaagatcaaccaaaaaggaggaagtggaagaagaagtagttatagaggaatatcatcaaacaactgaaaaaaattctccatctcctggagtcagcgacattgtagaaagcgtggccgctgtagagctcgatgatagcgacggggatgatgaacctatggtacaagttgaagctggtaaagtaaatcatagtgctagaagcgatctctctgacctaaaggtggctaccgacaatatcgttaaagatcttaagaaaattattactagaatctctgcagtatcgacggttctagaggatgttcaagcagctggtatctctagacaatttacttctatgactaaagctattacaacactatctgatctagtcaccgagggaaaatctaaagttgttcgtaaaaaagttaaaacttgtaagaagtaaatgcgtgcacttttttataaagatggtaaactctttaccgataataattttttaaatcctgtatcagacgataatccagcgtatgaggttttgcaacatgttaaaattcctactcatttaacagatgtagtagtatatgaacaaacgtgggaggaggcgttaactagattaatttttgtgggaagtgattcaaaaggacgtagacaatacttttacggaaaaatgcatgtacagaatcgcaacgctaaaagagatcgtatttttgttagagtatataacgttatgaaacgaattaattgttttataaacaaaaatataaagaaatcgtccacagattccaattatcagttggcggtttttatgttaatggaaactatgttttttattagatttggtaaaatgaaatatcttaaggagaatgaaacagtagggttattaacactaaaaaataaacacatagaaataagtcccgatgaaatagttatcaagtttgtaggaaaggacaaagtttcacatgaatttgttgttcataagtctaatagactatataagccgctattgaaactgacggatgattctagtcccgaagaatttctgttcaacaaactaagtgaacgaaaggtatatgaatgtatcaaacagtttggtattagaatcaaggatctccgaacgtatggagtcaattatacgtttttatataatttttggacaaatgtaaagtccatatctcctcttccatcaccaaaaaagttaatagcgttaactatcaaacaaactgctgaagtggtaggtcatactccatcaatttcaaaaagagcttatatggcaacgactattttagaaatggtaaaggataaaaattttttagatgtagtatctaaaactacgttcgatgaattcctatctatagtcgtagatcacgttaaatcatctacggatggatgatatagatctttacacaaataattacaaaaccgataaatggaaatggataagcgtatgaaatctctcgcaatgaccgctttctttggggagctaagcacattagatattatggcattgataatgtctatatttaaacgccatccaaacaataccattttttcagtggataaggatggtcagtttatgattgatttcgaatacgataattataaggcttctcaatatttggatctgaccctcactccgatatctggagatgaatgcaagactcacgcatcgagtatagccgaacaattggcgtgtgtggatattattaaagaggatattagcgaatatatcaaaactactccccgtcttaaacgatttataaaaaaataccgcaatagatcagatactcgcatcagtcgagatacagaaaagcttaaaatagctctagctaaaggcatagattacgaatatataaaagacgcttgttaataagtaaatgaaaaaaaactagtcgtttataataaaacacgatatggatgccaacgtagtatcatcttctactattgcgacgtatatagacgctttagcgaagaatgcttcggaattagaacagaggtctaccgcatacgaaataaataatgaattggaactagtatttattaagccgccattgattactttgacaaatgtagtgaatatctctacgattcaggaatcgtttattcgatttaccgttactaataaggaaggtgttaaaattagaactaagattccattatctaaggtacatggtctagatgtaaaaaatgtacagttagtagatgctatagataacatagtttgggaaaagaaatcattagtgacggaaaatcgtcttcacaaagaatgcttgttgagactatcgacagaggaacgtcatatatttttggattacaagaaatatggatcctctatccgactagaattagtcaatcttattcaagcaaaaacaaaaaactttacgatagactttaagctaaaatattttctaggatccggtgcccagtctaaaagttctttattacacgctattaatcatccaaagtcaaggcctaatacatctctggaaatagaatttacacctagagacaatgaaacagttccatatgatgaactaataaaggaattgacgactctctcgcgtcatatatttatggcttctccagagaatgtaattctttctccgcctattaacgcgcctataaaaacctttatgttgcctaaacaagatatagtaggtttggatctggaaaatctatatgccgtaactaagactgacggcattcctataactatcagagttacatcaaacgggttgtattgttattttacacatcttggttatattattagatatcctgttaagagaataatagattccgaagtagtagtctttggtgaggcagttaaggataagaactggaccgtatatctcattaagctaatagagcctgtgaatgcaatcaatgatagactagaagaaagtaagtatgttgaatctaaactagtggatatttgtgatcggatagtattcaagtcaaagaaatacgaaggtccgtttactacaactagtgaagtcgtcgatatgttatctacatatttaccaaagcaaccagaaggtgttattctgttctattcaaagggacctaaatctaacattgattttaaaattaaaaaggaaaatactatagaccaaactgcaaatgtagtatttaggtacatgtccagtgaaccaattatctttggagagtcgtctatctttgtagagtataagaaatttagcaacgataaaggctttcctaaagaatatggttctggtaagattgtgttatataacggcgttaattatctaaataatatctattgtttggaatatattaatacacataatgaagtgggtattaagtccgtggttgtacctattaagtttatagcagaattcttagttaatggagaaatacttaaacctagaattgataaaaccatgaaatatattaactcagaagattattatggaaatcaacataatatcatagtcgaacatttaagagatcaaagcatcaaaataggagatatctttaacgaggataaactatcggatgtgggacatcaatacgccaataatgataaatttagattaaatccagaagttagttattttacgaataaacgaactagaggaccgttgggaattttatcaaactacgtcaagactcttcttatttctatgtattgttccaaaacatttttagacgattccaacaaacgaaaggtattggcgattgattttggaaacggtgctgacctggaaaaatacttttatggagagattgcgttattggtagcgacggatccggatgctgatgctatagctagaggaaatgaaagatacaacaaattaaactctggaattaaaaccaagtactacaaatttgactacattcaggaaactattcgatccgatacatttgtctctagtgtcagagaagtattctattttggaaagtttaatatcatcgactggcagtttgctatccattattcttttcatccgagacattatgctaccgtcatgaataacttatccgaactaactgcttctggaggcaaggtattaatcactaccatggacggagacaaattatcaaaattaacagataaaaagacttttataattcataagaatttacctagtagcgaaaactatatgtctgtagaaaaaatagctgatgatagaatagtggtatataatccatcaacaatgtctactccaatgactgaatacattatcaaaaagaacgatatagtcagagtgtttaacgaatacggatttgttcttgtagataacgttgatttcgctacaattatagaacgaagtaaaaagtttattaatggcgcatctacaatggaagatagaccatctacaagaaactttttcgaactaaatagaggagccattaaatgtgaaggtttagatgtcgaagacttacttagttactatgttgtttatgtcttttctaagcggtaaataataatatggtatgggttctgatctcccagttctaaatgcattaaataattccaatagagcgatttttgttcctataggaccttccaactgtggatactctgtattgttaatagatatattaatacttttgtcgggtaacagaggttctacgtcttttaaaaataaaagtttgataacatctggcctgttcataaataaaaacttggcgattctatatatactcttattatcaaatctagccattgtcttatagatgtgagctactgtaggtgtaccatttgattttctttctaatactatatatttctctcgaagaagttcttgcacatcatctgggaataaaatactactgttgagtaaatcagttattttttttatatcgatattgatggacatttttatagttaaggataataagtatcccaaagtagataacgacgataacgaagtatttatacttttaggaaatcacaatgactttatcagattaaaattaacaaaattaaaggagcatgtatttttttctgaatatattgtgactccagatacatatggatctttatgcgtcgaattaaatgggtctagttttcagcacggcggtagatatatagaggtggaggaatttatagatgctggaagacaagttagatggtgttctacatccaatcatatatctaaagatatacccgaagatatgcacactgataaatttgtcatttatgatatatacacttttgacgctttcaagaataaacgattggtattcgtacaggtacctccgtcgttaggagatgatagtcatttgactaatccgttattgtctccgtattatcgtaattcagtagccagacaaatggtcaatgatatgatttttaatcaagattcatttttaaaatatttattagaacatctgattagaagccactatagagtttctaaacatataacaatagttagatacaaggataccgaagaattaaatctaacgagaatatgttataatagagataagtttaaggcgtttgtattcgcttggtttaacggcgtttcggaaaatgaaaaggtactagatacgtataaaaaggtatctaatttgatataatgaattcagtgactgtatcacacgcgccatatactattacttatcacgatgattgggaaccagtaatgagtcaattggtagagttttataacgaagtagccagttggctgctacgagacgagacgtcgcctattcctgataagttctttatacagttgaaacaaccgcttagaaataaacgagtatgtgtgtgcggtatagatccgtatccgaaagatggaactggtgtaccgttcgaatcaccaaattttacaaaaaaatcaattaaggagatagcttcatctatatctagattaaccggagtaattgattataaaggttataaccttaatataatagacggggttataccctggaattattacttaagttgtaaattaggagaaacaaaaagtcacgcgatctactgggataagatttccaagttactgctgcagcatataactaaacacgttagtgttctttattgtttgggtaaaacagatttctcgaatatacgggccaagttagaatccccggtaactaccatagtcggatatcatccagcggctagagaccgccaattcgagaaagatagatcatttgaaattatcaacgttttactggaattagacaacaaggcacctataaattgggctcaagggtttatttattaatgctttagtgaaattttaacttgtgttctaaatggatgcggctattagaggtaatgatgttatctttgttcttaagactataggtgtcccgtcagcgtgcagacaaaatgaagatccaagatttgtagaagcatttaaatgcgacgagttagaaagatatattgagaataatccagaatgtacactattcgaaagtcttagggatgaggaagcatactctatagtcagaattttcatggatgtagatttagacgcgtgtctagacgaaatagattatttaacggctattcaagattttattatcgaggtgtcaaactgtgtagctagattcgcgtttacagaatgcggcgccattcatgaaaatgtaataaaatccatgagatctaatttttcattgactaagtctacaaatagagataaaacaagttttcatattatctttttagacacgtataccactatggatacattgatagctatgaaacgaacactattagaattaagtagatcatctgaaaatccactaacaagatcgatagacactgccgtatataggagaaaaacaactcttcgggttgtaggtactaggaaaaatccaaattgcgacactattcatgtaatgcaaccaccgcatgataatatagaagattacctattcacttacgtggatatgaacaacaatagttattacttttctctacaacaacgattggaggatttagttcctgataagttatgggaaccagggtttatttcattcgaagacgctataaaaagagtttcaaaaatattcattaattctataataaactttaatgatctcgatgaaaataattttacaacggtaccactggtcatagattacgtaacaccttgtgcattatgtaaaaaacgatcgcataaacatccgcatcaactatcgttggaaaatggtgctattagaatttacaaaactggtaatccacatagttgtaaagttaaaattgttccgttggatggtaataaactgtttaatattgcacaaagaattttagacactaactctgttttattaaccgaacgaggagaccatatagtttggattaataattcatggaaatttaacagcgaagaacccttgataacaaaactaattttgtcaataagacatcaactacctaaggaatattcaagcgaattactctgtccaagaaaacgaaagactgtagaagctaacatacgagacatgttagtagattcagtagagaccgatacctatccggataaacttccgtttaaaaatggtgtattggacctggtagacggaatgttttactctggagatgatgctaaaaaatatacgtgtactgtatcaaccggatttaaatttgacgatacaaagttcgtcgaagacagtccagaaatggaagagttaatgaatatcattaacgatatccaaccattaacggatgaaaataagaaaaatagagagctatatgaaaaaacattatctagttgtttatgcggtgctaccaaaggatgtttaacattcttttttggagaaactgcaactggaaagtcgacaaccaaacgtttgttaaagtctgctatcggtgacctgtttgttgagacgggtcaaacaattttaacagatgtattggataaaggacctaatccatttatcgctaacatgcatttgaaaagatctgtattctgtagcgaactacctgattttgcctgtagtggatcaaagaaaattagatctgacaatattaaaaagttgacagaaccttgtgtcattggaagaccgtgtttctccaataaaattaataatagaaaccatgcgacaatcattatcgatactaattacaaacctgtttttgataggatagataacgcattaatgagaagaattgccgtcgtgcgattcagaacacacttttctcaaccttctggtagagaggctgctgaaaataatgacgcgtacgataaagtcaaactattagacgaggggttagatggtaaaatacaaaataatagatatagattcgcatttctatacttgttggtgaaatggtacagaaaatatcatgttcctattatgaaactatatcctacacccgaagagattcctgactttgcattctatctcaaaataggtactctgttagtatctagctctgtaaagcatattccattaatgacggacctctccaaaaagggatatatattgtacgataatgtggtcactcttccgttgactactttccaacagaaaatatccaagtattttaattctagactatttggacacgatatagagagcttcatcaatagacataagaaatttgccaatgttagtgatgaatatctgcaatatatattcatagaggatatttcatctccgtaaatatatgctcatatatttatagaagatatcacatatctaaatgaataccggaatcatagatttatttgataatcatgttgatagtataccaactatattacctcatcagttagctactctagattatctagttagaactatcatagatgagaacagaagcgtgttattgttccatattatgggatcaggtaaaacaataatcgctttgttgttcgccttggtagcttccagatttaaaaaggtttacattctagtgcctaatatcaacattttgaaaatttttaattataatatgggtgtagctatgaacttgtttaatgacgaattcatagctgagaatatctttattcattccacaacaagtttttattctcttaattataacgataacgtcattaattataacggattatctcgctacaataactctatttttatcgttgatgaggcacataatatctttgggaataatactggagaacttatgaccgtgataaaaaataaaaacaagattccttttctactattgtctggatctcccattactaacacacctaatactctgggtcatattatagatttaatgtccgaagagacgatagattttggtgagattattagtcgtggtaagaaagtaattcagacacttcttaacgaacgcggtgtgaatgtacttaaggatttgcttaaaggaagaatatcatattacgaaatgcctgataaagatctaccaacgataagatatcacggacgtaagtttctagatactagagtagtatattgtcacatgtctaaacttcaagagagagattatatgattactagacgacagctatgttatcatgaaatgtttgataaaaatatgtataacgtgtcaatggcagtattgggacaacttaatctgatgaataatttagatactttatttcaggaacaggataaggaattgtacccaaatctgaaaataaataatggcgtgttatacggagaagaattggtaacgttaaacattagttccaaatttaaatactttattaatcggatacagacactcaacggaaaacattttatatacttttctaattctacatatggcggattggtaattaaatatatcatgctcagtaatggatattctgaatataatggttctcagggaactaatccacatatgataaacggcaaaccaaaaacatttgctatcgttactagtaaaatgaaatcgtctttagaggatctattagatgtgtataattctcctgaaaacgatgatggtagtcaattgatgtttttgttttcgtcaaacattatgtccgaatcctatactctgaaagaggtaaggcatatttggtttatgactatcccagatactttttctcaatacaaccaaattcttggacgatctattagaaaattctcttacgccgatatttctgaaccagttaatgtatatcttttagccgccgtatattccgatttcaatgacgaagtaacgtcattaaacgattacacacaggatgaattgattaatgttttaccatttgacatcaaaaagctgttatatctaaaatttaagactaaagaaacgaatagaatatactctattcttcaagagatgtctgaaacgtattctcttccaccacatccatcaattgtaaaagttttattgggagaattggtcagacaatttttttataataattctcgtattaagtataacgactccaagttacttaaaatggttacatcagttataaaaaataaagaagacgctaggaattacatagatgatattgtaaacggtcacttctttgtatcgaataaagtatttgataaatctcttttatacaaatacgaaaacgatattattacagtaccgtttagactttcctacgaaccatttgtttggggagttaactttcgtaaagaatataacgtggtatcttctccataaaactgatgaaatatataaagaaataaatgtcgagctttgttaccaatggataccttccagttacattggaaccacacgagctgacgttagacataaaaactaatattaggaatgccgtatataagacgtatctccatagagaaattagtggtaaaatggccaagaaaatagaaattcgtgaagacgtggaattacctctcggcgaaatagttaataattctgtagttataaacgttccgtgtgtaataacctacgcgtattatcacgttggggatatagtcagaggaacattaaacatcgaagatgaatcaaatgtaactattcaatgtggagatttaatctgtaaactaagtagagattcgggtactgtatcatttagcgattcaaagtactgcttttttcgaaatggtaatgcgtatgacaatggcagcgaagtcactgccgttctaatggaggctcaacaaggtatcgaatctagttttgtttttctcgcgaatatcgtcgactcataaaaaagagaatagcggtaagtataaacacgaatactatggcaataattgcgaatgttttattctcttcgatatatttttgataatatgaaaaacatgtctctctcaaatcggacaaccatctcataaaatagttctcgcgcgctggagaggtagttgctgctcgtataatctccccagaataatatacttgcgtgtcgtcgttcaatttatacggatttctatagttctctgttatataatgcggttttccatcatgattagacgacgacaatagtgttctgaatttagatagttgatcagaatgaatgtttattggcgttggaaaaattatccatacagcgtctgcagagtggttgatagttgttcctagatatgtaaaataatccaacttactaggcagcaaattgtctagataaaatactgaatcaaacggtgcagacgtattggcggatctaatggaatccaattgattaactatcttttgaaaatatacatttttatgatccaatacttgtaagaatatagaaataatgataagtccatcatcgtgtttttttgcctcttcataagaactatattttttcttattccaatgaacaagattaatctctccagagtatttgtacacatctatcaagtgattggatccataatcgtcttcctttccccaatatatatgtagtgatgataacacatattcattggggagaaaccctccacttatatatcctcctttaaaattaatccttactagttttccagtgttctggatagtggttggtttcgactcattataatgtatgtctaacggcttcaatcgcgcgttagaaattgcttttttagtttctatattaataggagatagttgttgcggcatagtaaaaatgaaatgataactgtttaaaaatagctcttagtatgggaattacaatggatgaggaagtgatatttgaaactcctagagaattaatatctattaaacgaataaaagatattccaagatcaaaagacacgcacgtgtttgctgcgtgtataacaagtgacggatatccgttaataggagctagaagaacttcattcgcgttccaggcgatattatctcaacaaaattcagattctatctttagagtatccactaaactattacggtttatgtactacaatgaactaagagaaatctttagacggttgagaaaaggttctatcaacaatatcgatcctcactttgaagagttaatattattgggtggtaaactagataaaaaggaatctattaaagattgtttaagaagagaattaaaagaggaaagtgatgaacgtataacagtaaaagaattcggaaatgtaattctaaaacttacaacgcgcgataaattatttaataaagtatatataggttattgcatggcgtgttttattaatcaatcgttggaggatttatcgcatactagtatttacaatgtagaaattagaaagattaaatcattaaatgattgtattaacgacgataaatacgaatatctgtcttatatttataatatgctagttaatagtaaatgaacttttacagatctagtataattagtcagattattaagtataatagacgactagctaagtctattatttgcgaggatgactctcaaattattacactcacggcattcgttaaccaatgcctatggtgtcataaacgagtatccgtgtccgctattttattaactactgataacaaaatattagtatgtaacagacgagatagttttctctattctgaaataattagaactagaaacatgtttagaaagaaacgattatttctgaattattccaattatttgaacaaacaggaaagaagtatactatcgtcatttttttctctagatccagctactgctgataatgatagaatagacgctatttatccgggtggcatacccaaaaggggtgagaatgttccagagtgtttatccagggaaattaaagaagaagttaatatagacaattcttttgtattcatagacactcggttttttattcatggcatcatagaagataccattattaataaattttttgaggtaatcttctttgtcggaagaatatctctaacgagtgatcaaatcattgatacatttaaaagtaatcatgaaatcaaggatctaatatttttagatccgaattcaggtaatggactccaatacgaaattgcaaaatatgctctagatactgcaaaactcaaatgttatggccatagaggatgttattacgaatcattaaaaaaattaactgaggatgattgattagaaaatataaattaatttaccatcgtgtatttttataacgggattgtccggcatatcatgtagatagttaccgtctacatcgtatactcgaccatctacgcctttaaatcctctatttattgacattaatctattagaattggaataccaaatattagtaccctcaattagtttattggtaatatttttgttagacgatagatcgatggctcttgaaaccaaggttttccaaccggactcattgtcgatcggtgagaagtctttttcattagcatgaatccattctaatgatgtatgtttaaacactctaaacaattggacaaattcttttgatttgctttgaatgatttcaaataggtcttcgtctacagtaggcataccattagataatctagccattataaagtgcacgtttacatatctacgttctggaggagtaagaacgtgactattgagacgaatggctcttcctactatctgacgaagagacgcctcgttccatgtcatatctaaaatgaagatatcattgattgagaagaagctaataccctcgcctccactagaagagaatacgcatgttttaatgcattctccgttagtgtttgattcttggttaaactcagccaccgccttgattctagtatcttttgttctagatgagaactctatattagagataccaaagactttgaaatatagtaataagatttctattcctgactgattaacaaatggttcaaagactagacatttaccatgggatgctaatattcccaaacatacatctataaatttgacgcttttctcttttaattcagtaaatagagagatatcagccgcactagcatcccctcccaatagttctccccttttaaaggtatctaatgcagatttagaaaattctctatctcttaatgaatttttaaaatcattatatagtgttgctatctcttgcgcgtattcgcccggatcacgattttgtctttcaggaaagctatcgaacgtaaacgtagtagccatacgtctcagaattctaaatgatgatatacctgtttttatttcagcgagtttagccttttgataaatttcttcttgctttttcgacatattaacgtatcgcattaatactgttttcttagcgaatgatgcagacccttctacgtcatcaaaaatagaaaactcgttattaactatgtacgaacataggcctcctagtttggagactaattctttttcatcaactagacgtttattctcaaatagcgattggtgttgtaaggatcctggtcgtagtaagttaaccaacatggtgaattcttgcacactattgacgataggtgtagccgataaacaaatcatcttatggttttttaatgcgatggtcttagataaaaaattatatactgaacgagtaggacggatcttaccatcttctttgattaatgatttagaaatgaagttatgacattcatcaataatgacgcatattctactcttggaattaatagttttgatattagtaaaaaatttatttctaaaattttgatcatcgtaattaataaaaatacaatccttcgttatctctggagcgtatctgagtatagtgttcatccaaggatcttctatcaaagcctttttcaccaataagataatagcccaattcgtataaatatccttaagatgtttgagaatatatacagtagtcattgttttaccgacacccgtttcatggaacaataaaagagaatgcatactgtctaatcctaagaaaactcttgctacaaaatgttgataatccttgaggcgtactacgtccgaccccatcatttcaacaggcatattagtagttctgcgcaatgcataatcgatataggccgcgtgtgatttactcatttatgagtgataagtaataactatgttttaaaaatcacagcagtagtttaactagtcttctctgatgtttgttttcgatactttttgaatcagaagtcatactagaataaagcaacgagtgaacgtaatagagagcttcgtatactctattcgaaaactctaagaacttattaatgaattccgtatccactggattgtttaaaatactaaattgaacactgttcacatccttccaagaagaagacttagtgacggacttaacatgagacataaataaatccaaattttttttacaaacatcactagccaccataatggcgctatcttttaaccagctatcgcttacgcattttagcagtctaacatttttaaagagactacaatatattctcatagtatcgattacacctctaccgaataaagttggaagtttaataatacaatatttttcgtttacaaaatcaaataatggtcgaaacacgtcgaaggttaacatcttataatcgctaatgtatagattgttttcagtgagatgattattagatttaatagcatctcgttcacgtttgaacagtttattgcgtgcgctgaggtcggcaactacggcgtccgctttagtactcctcccataatactttacgctattaatctttaaaatttcatagactttatctagatcgctttctggtaacatgatatcatgtgtaaaaagttttaacatgtcggtcggcattctatttagatcattaactctagaaatctgaagaaagtaattagctccgtattccagactaggtaatgggcttttacctagagacagattaagttctggcaatgtttcataaaatggaagaaggacatgcgttccctcccggatattttttacaatttcatccatttacaactctatagtttgttttcattattattagttattatctcccataatcttggtaatacttaccccttgatcgtaagataccttatacaggtcattacatacaactaccaattgtttttgtacataatagattggatggttgacatccatggtggaataaactactcgaacagatagtttatctttccccctagatacattagccgtaatagttgtcggcctaaagaatatctttggtgtaaagttaaaagttagggttcttgttccattattgctttttgtcagtagttcattataaattctcgagatgggtccgttctctgaatatagaacatcatttccaaatctaacttctagtctagaaataatatcggtcttattcttaaaatctattcccttgatgaagggatcgttaatgaacaaatccttggcctttgattcggctgatctattatctccgttatagacgttacgttgactagtccaaagacttacaggaatagatgtatcgatgatgttgatactatgtgatatgtgagcaaagattgttctcttagtggcatcactatatgttccagtaatggcggaaaactttttagaaatgttatatataaaagaattttttcgtgttccaaacattagcagattagtatgaagataaacactcatattatcaggaacattatcaatttttacatacacatcagcatcttgaatagaaacgataccatcttctggaacctctacgatctcggcagactccggataaccagtcggtggaccatcgctaacaataactagatcatccaacaatctactcacatatgcatctatataatctttttcatcttgtgagtaccctggatacgaaataaatttattatccgtatttccataataaggtttagtataaacagagagcgatgttgccgcatgaacttcagttacagtcgccgttggttggtttatttgacctattactctcctaggtttctctataaatgatggtttaatttgtacattcttaaccatatatccaataaagctcaattcaggaacataaacaaattctttgttgaacgtttcaaagtcgaacgaagagtcacgaataacgatatcggatactggattgaaggttaccgttacggtaatttttgaatcggatagtttaagactgctgaatgtatcttccacatcaaacggagttttaatataaacgtatactgtagatggttctttaatagtgtcattaggagttaggccaatagaaatatcattaagttcactagaatatccagagtgtttcaaagcaattgtattattgatacaattattatataattcttcgccctcaatttcccaaataacaccgttacacgaagagatagatacgtgattaatacatttatatccaacatatggtacgtaaccgaatcttcccatacctttaacttctggaagttccaaactcagaaccaaatgattaagcgcagtaatatactgatccctaatttcgaagctagcgatagcctgattgtctggaccatcgtttgtcataactccggatagagaaatatattgcggcatatataaagttggaatttgactatcgactgcgaagacattagaccgtttaatagagtcatccccaccgatcaaagaattaatgatagtattattcattttctatttaaaatggaaaaagcttacaataaactccgtagagaaatatctataatttgtgagttttccttaaagtaacagcttccgtaaacgccgtctttatctcttagtaagtttattgtatttataaccttttccttatcttcatagaatactaaaggcaacaaagaaatttttggttcttctctaagagctacgtgagacttaaccatagacgccaacgaatccctacatattttagaacagaaatacccaacttcaccacccttgaatgtctcaatactaataggtttaaaaaccaaatcttgattacaaaaccaacacttatcaattacactatttgtcttaatagacacatctgccatagatttataatactttggtagtatacaagcgagtgcttcttctttagcgggcttaaagactgctttaggtgctgaaataaccacatctggaaggcttactcgcttagccatttaattacggaactatttttttatacttctaatgagcaagtagaaaacctctcatctacaaaaacatactcgtgtccataatcctctaccatagttacacgttttttagatctcatatgtgctaaaaagttttcccatactaattggttactattatttttcgtataatttttaacagtttgaggttttagatttttagttacagaagtgatatcgaatattttatccaaaaagaatgaataattaattgtcttagaaggagtgttttcttggcaaaagaataccaagtgcttaaatatttctactacttcattaatcttttctgtactcagattcagtttctcatcttttacttgattgattatttcaaagactaacttataatcctttttatttattctctcgttagccttaagaaaactagatacaaaatttgcatctacatcatccgtggatatttgatttttttccatgatatccaagagttccgagataatttctccagaacattgatgagacaataatctccgcaatacatttctcaaatgaataagtttattagacacatggaagtttgactttttttgtacctttgtacatttttgaaataccgactcgcaaaaaatacaatattcatatccttgttcagatactataccgttgtgtctacaaccgctacataatcgtagattcatgttaacactctacgtatctcgtcgtccaatattttatataaaaacattttatttctagacgttgccagaaaatcctgtaatatttttagttttttgggctgtgaataaagtatcgccctaatattgttaccgtcttccgccaatatagtagttaaattatccgcacatgcaaaagaacaccgcttaggcggattcagtacaatgttatatttttcgtaccaactcatttaaatatcataatctaaaatagttctgtaatatgtctagcgctaatatattgatcataatcctgtgcataaattaagatacaacaatgtctcgaaatcatcgacatggcttcttccatagttagaagatcgtcgtcaaagttagcaacgtgattcatcaacatttgctgttttgaggcagcaaatactgaaccgtcgccattcaaccattcataaaaaccatcgtctgaatccattgataatttcttgtactggtttttgagagctcgcatcaatctagcatttctagctcccggattgaaaacagaaagaggatcgtacatccagggtccattttctgtaaatagaatcgtataatgtcccttcaagaagatatcagacgatccacaatcaaagaattggtctccgagtttgtaacaaactgcggactttaacctatacatgataccgtttagcatgatttctggtgatacgtcaatcggagtatcatctattagagatctaaagccggtgtaacattctccaccaaacatattcttattctgacgtcgttctacataaaacatcattgctccattaacgataacaggggaatgaacagcactacccatcacattagttcccaatggatcaatgtgtgtaactccagaacatcttccatatcctatgttaggaggagcgaacaccactcttccactattgccatcgaatgccatagaataaatatccttggaattgatagaaatcggactgtcggatgttgtgatcatcttcataggattaacaactatgtatggtgccgcctgaagtttcatatcgtaactgatgccgtttataggtctagccacagaaaccaacgtaggtctaaatccaactatagacaaaatagaagccaatatctgttcctcatctgtcataacttgagagcatccagtatgaataatcttcattagatggggatctaccgcatcatcatcgttacaataaaaaattcccattctaatgttcataattgcttttctaatcatggtatgcatgtttgctctctgaatctctgtggaaattagatctgatacacctgtaatcactatcggattatcctccgtaagacgattaaccaacaacatataattataagactttacttttctaaattcataaagttgctggattaggctataggtgtctccatgtacatacgcgttctcgagcgcaggaagtttaataccgaatagtgccatcagaataggatgaatatagtaattagtttctggttttctataaataaaagacaaatcttgtgaactagacatatcggtaaaatgcatggattggaatcgtgtagtcgacagaagaatatgatgattagatggagagtatattttatctaactctttgagttggtcaccgattctaggactagctcgagaatgaataagtactaaaggatgagtacatttcacagaaacactagcattgttcaatgtgctctttacatgggtaaggagttgaaatagctcgtttctatttgttctgacaatatttagtttattcataatgttaagcatatcctgaatagtaaagttagatgtgtcatacttgttagtagttagatatttagcaattgcattcccatcatttctcaatctcgtactccaatcatgtgtagatgctacttcgtcgatggaaaccatacaatcctttttgataggctgttgagattgattatttcctgcacgtttaggtttggtacgttgatttctagcccctgcggatataaagtcatcgtctacaatttgggacaatgaattgcatacactacaagacaaagatttatcagaagtgtgaatatgatcttcatctaccaaagaaagagtttgattagtataactagattttagtcctgcgttagatgttaaaaaaacatcgctattgaccacggcttccattatttatattcgtagtttttactcgaaagcgtgattttaatatccaatcttattacttttggaatcgttcaaaacctttgactagttgtagaatttgatctattgccctacgcgtatactcccttgcatcatatacgttcgtcaccagatcgtttgtttcggcctgaagttggtgcatatctctttcaacattcgacatgagatccttaagggccatatcgtctagattttgttgagatgctgctcctggatttggattttgttgtgctgttgtacatactgtaccaccagtaggtgtaggagtacatacagtggccacaataggaggttgaggaggtgtaaccgttggagtagtacaagaaatatttccatccgattgttgtgtacatgtagttgttggtaacgtctgagaaggttgggtagatggcggtgtcgtcgtcttttgatctttattaaatttagagataatatcctgaacagcattgctcggcgtcaacgctggaaggagtgaactcgccggcgcatcagtatcttcagacagccaatcaaaaagattagacatatcagatgatgtattagtttgttgtcgtggttttggtgtaggaacagtactactaggtagaagaataggagccggtgtagctgttggaaccggctgtggagttatatgaatagttggttgtagcggttggataggctgtctgctggcgaccgtcatattatctctagctagttgttctcgcaactgtctttgataatacgactcttgagactttagtcctatttcaatcgcttcatcctttttcgtatccggatccttttcttcagaataatagattgacgactttggtgtagaggattctgccagcccctgtgagaacttgttaaagaagtccatttaaggctttaaaattgaattgcgattataagattaaatggcagacacagacgatattatcgactatgaatccgatgatctcaccgaatacgaggatgatgaagaagaggaagaagatggagagtcactagaaactagtgatatagatcccaaatcttcttataagattgtagaatcagcatccactcatatagaagatgcgcattccaatcttaaacatatagggaatcatatatctgctcttaaacgacgctatactagacgtataagtctatttgaaatagcgggtataatagcagaaagctataacttgcttcaacgaggaagattacctctagtttcagaattttctgacgaaacgatgaagcaaaatatgctacatgtaattatacaagagatagaggagggttcttgtcctatagtcatcgaaaagaacggagaattgttgtcggtaaacgattttgacaaagatggtctaaaattccatctagactatattatcaaaatttggaaacttcaaaaacgatattagaatttatacgaatatcgttctctaaatgtcacaatcaagtctcgcatgttcagcaatttattgtcgtactttatatcgtgttcattaacgatatcttgcaaaatagtaatgattctatcttccttcgatagatattcttcagagattattgtcttatattttttcttgttatccgatatgaatttgataagactttgaacattattgatacccgtctgtttaattttttctacagatattttagttttggcagattctatcgtatctgtcaatagacatccaacatcgacattcgacgtcaattgtctataaatcaacgtataaattttagaaataacattagcgaattgttgtgcattgatgtcgttattctgaaacagtatgattttaggtagcattttcttaacaaagagaacgtatttattgttactcagttgaacagatgatatatccagattactaacgcatctgattccgtataccaaactttcagaagaaatggtgtacaattgtttgtattcattcaatgtctctttttcagaaattagtttagagtcgaatactgcaataattttcaagagatagttttcatcagataagattttatttagtgtagatatgataaaactattgttttgttggagaacttgatacgccgcgttctctgtagtcgacgctctcaaatgggaaacaatctccattatttttttggaatcggatactatatcttcggtatcttgacgcagtctagtatacatagagttaagagagattagagtttgtacattaagcaacatgtctctaaatgtggctacaaacttttcctttttcacataatctagtttattatataccgatttcacaacggcaccagatttaaggaaccagaatgaaaaactctgataactacaatatttcatcatagttacgattttatcatcttctatagttggtgtaatagcgcatacctttttctccaagactggaaccaacgtcataaaaatgtttaaatcaaaatccatatcaacatctgatgcgctaagaccagtctcgcgttcaagattatctttactaatggtgacgaactcatcatatagaactctaagtttgtccattatttatttacagatttagttgtttaatttatttgtgctcttccagagttgggatagtatttttctaacgtcggtattatattattaggatctacgttcatatgtatcataatattaatcatccacgttttgataaatctatctttagcttctgaaataacgtatttaaacaaaggagaaaaatatttagctacggcatcagacgcaataacattttttgtaaatgtaacgtatttagacgacagatcttcgttaaaaagttttccatctatgtagaatccatcggttgttaacaccattcccgcgtcagattgaataggagtttgaatagtttgttttggaaatagatccttcaataacttatagttgggtgggaaaaaatcgattttatcactagactctttcttttttactatcattacctcatgaactatttcttgaatgagtatatgtattttctttcctatatcggacgcgttcattggaaaatataccatgtcgttaactataagaatatttttatcctcgtttacaaactgaataatatcagatgtagttcgtaaacgaactatatcatcaccagcacaacatctaactatatgatatccactagtttcctttagccgtttattatcttgttccatattagcagtcattccatcatttaagaaggcgtcaaagataatagggagaaatgacattttggattctgttacgactttaccaaaattaaggatatacggacttactatctttttctcaacgtcgatttgatgaacacacgatgaaaatgtgcttctatgagattgatcatgtagaaaacaacaagggatacaatatttccgcatatcatgaaatatattaagaaatcccaccttattatatttccccaaaggatccatgcatgtaaacattatgccgttatcattaataaagacttctttctcatcggatttgtaaaagttgttactgatttttttcattccaggatctagataattaataatgatgggttttctattcttattctttgtattttggcatatcctagaccagtaaacagtttccactttggtaaaatcagcagacttttgaacgctattaaacatggcattaatggcaataactaaaaatgtaaaatatttttctatgttaggaatatggtttttcactttaatagatatatggtttttggccaaaatgatagatatttttttatccgaggatagtaaaatattattagtcgccgtctctataaaaatgaagctagtctcgatatccaattttattctagaattgataggagtcgccaaatgtaccttatacgttatatctcccttgatgcgttccatttgtgtatctatatcggacacaagatctgtaaatagttttacgttattaatcatcacggtatcgccgtcgctagataacgctaatgtaccatccaagtcccaaatggagagatttaactgttcatcgtttagaataaaatgattaccggtcatattaataaagtgttcatcgtatctagataacaacgacttataattaatgtccaagtcttgaactcgctgaatgatcttttttaacccagttagttttagattggtacgaaatatattgttaaactttgattctacagtaatgtccaaatctagttgtggaaatacttccatcaacattgtttcaaacttgataatattattatctacatcttcatacgatccaaattccggaatagatgtatcacatgctcttgccacccagataaccaaaaagtcacacgctccaggatatacattgtataaaaagctatcgttttttagtagtgtttttttctgagtatatacgaagggattaaaaatagtattatcaacgtaactatattccaaattattcttatgagaatagataataatatcgtccttaatatctaacaaatttcctaaatatccctttaattgagtcattcgaagcgtcaatagaatatgtctcttaactatttccggctgttgtatatttaaatgacttcgtaaaaaataatatatgggcgacttctcatctatgtaatcatatggagtgagatatagggctcgttctacctcctgccccttacccacctgtaataccaattgcggacttactatatatcgcatatttatatcgtggggtaaagtgaaaatctactaccgatgatgtaagtcttacaatgttcgaaccagtaccagatcttaatttggaggcctccgtagaactaggggaggtaaatatagatcaaacaacacctatgataaaggaaaatagcggttttatatcccgtagtagacgtctattcgcccatagatctaaggatgatgagagaaaactagcactacgattctttttacaaagactttattttttagatcatagagagattcattatttgttcagatgcgttgacgctgtaaaagacgtcactattaccaaaaaaaataacattatcgtggcgccttatatagcacttttaactatcgcatcaaaaggatgcaaacttacagaaacaatgattgaagcattttttccagaactatataatgaacatagtaagaaatttaaattcaactctcaagtatccatcatccaagaaaaactcggataccagtttggaaactatcacgtttatgattttgaaccgtattactctacagtagctctggctattcgagatgaacattcatctggcatttttaatatccgtcaagagagttatctggtaagttcattatctgaaataacatatagattttatctaattaatctaaaatctgatcttgttcaatggagtgctagtacgggcgctgtaattaatcaaatggtaaatactgtattgattacagtgtatgaaaagttacaactggtcatagaaaatgattcacaatttacatgttcattggctgtggaatcaaaacttccaataaaattacttaaagatagaaatgaattatttacaaaattcattaacgagttaaaaaagaccagttcattcaagataagcaaacgcgataaggatacgctactaaaatattttacttaggactggagttagaatttatagacgactcatttcgtttatcattgttactattattactattactatcattattagtgttggcattattagtattcttcttgtcatcttgttcagaaatatacagcaatgctatacctaatactaaatacattatcatgctcgcaatggctctaacaacaacgaaccaaaatgaatttggtcgtagcttttgttcacaaaaatacataaagaaatgtctacataaatctatggcgccattggctacttgaaatagcgccagtcctcctacagattttaatatagctgtataacatgacatttattcatcatcaaaagagacagagtcaccatctgtcatatttagattttttttcatgtgttcaaagtatcctctactcatttcattataatagtttatcatacttagaattttaggacggatcaatgagtaagacttgactagatcgtcagtagtaatttgtgcatcgtctattctgcatccgcttcgtcgaataatgtatagcatcgctttgagattctccatagctatcaagtctttatacaatgacatggaaatatctgtgaatactttatacttctccaacatcgatgccttaacatcatcgcctactttagcattgaaaatacgttctattgtgtagatggatgtagcaagatttttaaacaacaatgccatcttacacgatgattgcctcaagtctccaatcttttgtttagaacgattagctacagagttcaacgcttggctgactagcatattattatctttagaaattgtattcttcaatgaggcgtttatcatatctgtgatttcgttagtcatattacagtctgactgggttgtaatgttatccaacatatcacctatggatacggtacacgtaccagcatttgtaataatcctatctaagatgttgtatggcattgcgcagaaaatatcttctcctgtaatatctccactctcgataaatctactcagattattcttaaatgccttattctctggagaaaagatatcagtgtccatcatttcattaatagtatacgcagaaaagataccacgagtatcaattctatccaagatacttatcggttccgagtcacagataatggtttcctctccttcgggagatcctgcatagaaatatctaggacaatagtttctatactgtctgtaactctgataatctctaaagtcactaactgataccatgaaattgagaagatcaaacgctgaagtaatcaatttttctgcctcgtttttactacaactagttttcatcaatgtagcgacgatgtattgtttagttactcttggtctaatactgatgatagagatattattgcttcccataatggatcttctagtagtcaccttaaagcccattgatgcgaatagcagatagataaagtcttggtatgactcctttctaatatagtacggactacctttgtcacccaactttatacccacataagccataacaacctctttaatagccgtttcatgaggtttatcagccatgagcctgagtagttggaagaatctcatgaatcccgtctcagaaagtcctatatgcatgatagatttatctttcctgggaaactctcgtatagtcatagatgaaatactcttcaaagtttctgaaataagattagtaacagtcttacctccgactactctgggtaacaaacatactctaataggtgttttctctgcggagataatatcagaaaggatagagcaataagtagtattattgtgattataaagaccgaatacataacaggtagaatttataaacatcatgtcctgaaggtttttagacttgtattcctcgtaatccataccgtcccaaaacatggatttggtaactttgatagccgtagatctttgttccttcgccaacaggttaaagaaattaataaagaatttgttgtttctatttatgtccacaaattgcacgtttggaagcgccacggttacattcactgcagcattttgaggatcgcgagtatgaagtacgatgttattgtttactggtatatctggaaagaaatctaccagtctaggaataagagattgatatcgcatagaaatagtaaagtttataatctcatcatcgaagagcattttgttaccattgtaataaatatccactctgtcatatgtataaatgaagtactgttcaaacatgatgagatgtttatatgttggcatagtagtgagatcgacgtttggtaatggcaatgtattaagattaactccataatgtctagcagcatctgcgatgttataagcgtcgtcaaagcggggtcgatcttgtattgttatatattgtctaacacctataagattatcaaaatcttgtctgcttaatacaccgttaacaatttttgccttgaattcttttattggtgcattaataacatccttatagaggatgttaaacaaataagtgttatcaaagttaagatctggatatttcttttctgctagaacatccattgagtcggagccatctggtttaatataaccaccgataaatctagctctgtattctgtatccgtcaatctaatattaagaaggtgttgagtgaaaggtggaagatcgtaaaagctgtgagtattaatgataggattagtttccgaactaatgttaattggggtattaataatatctatatttccagcgttaagtgtaacattaaacagttttaattcacgtgacgtggtatcaattaaataattaatgcccaatttggatatagcagcctgaagctcatcttgtttagttacggatcctaatgagttattaagcaatatatcgaacggatgaacgaaggttgttttaagttggtcacatactttgtaatctagacatagatgcggaagaacggtagaaactatacgaaataaatattcagagtcctctaattgatcaagagtaactattgacttaataggcatcatttatttagtattaaatgacgaccgtaccagtgacggatatacaaaacgatttaattacagagttttcagaagataattatccatctaacaaaaattatgaaataactcttcgtcaaatgtctattctaactcacgttaacaacgtggtagatagagaacataatgccgccgtagtgtcatctccagaggaaatatcctcacaacttaatgaagatctatttccagatgatgattcaccggccactattatcgaacgagtacaacctcatactactattattgacgatactccacctcctacttttcgtagagagttattgatatcggaacaacgtcaacaacgagaaaaaagatttaatattacagtatcgaaaaatgctgaagcaataatggaatctagatctatgataacttctatgccaacacaaacaccatccttgggagtagtttatgataaagataaaagaattcagatgttggaggatgaagtggttaatcttagaaatcaacgatctaatacaaaatcatctgataatttagataattttaccaaaatactatttggtaagactccgtataaatcaacagaagttaataagcgtatagccatcgttaattatgcaaatttgaacgggtctcccttatcagtcgaggacttggatgtttgttcagaggatgaaatagatagaatctataaaacgattaaacaatatcacgaaagtagaaaacaaaaaattatcgtcactaacgtgattattattgtcataaacattatcgagcaagcattgctaaaactcggatttgaagaaatcaaaggactgagtaccgatatcacttcagaaattatcgatgtggagatcggagatgactgcgatgctgtagcatcaaaactaggaatcggtaacagtccggttcttaatattgtattgtttatactcaagatattcgttaaacgaattaaaattatttaatttaatacattcccatatccagacaacaatcgtctggattaatctgttcctgtcgtctcataccggacgacatattaatctttttattagtaggcatctttttagatggtttctttttcccagcattaactgagtcgatacctagaagatcgtgattgatctctccgaccattccacgaacttctaattggccgtctctaacggtaccataaactattttaccagcattagtaacagcttggacaatctgaccatccatcgcattgtacgatgtagtagtaactgttgttctacgtctaggagcaccagaagtatttttggagcccttggaggctgatgtagaagaagacgaggattttgattttggtttacatgtaatacattttgaactctttgattttgtatcacatgcgccggcagtcacatctgtttgagaattaagattattgttgcctcctttgacggctgcatctccaccgatttgcgctagtagatttttaagctgtggtgtaatcttattaactgtttcgatataatcatcgtaactgcttctaacggctaaattttttttatccgccatttagaagctaaaaatatttttatttatacagaagatttaactagattatacaatgaactaatatgatccttttccagattatttacaaacttggtattttttggttctggaggaggcgaatttaaattcggacttggattcggattttgtgagttcttgatcttattatacatcgagtataggatggcgacggtaactgctacacaaataccgatcaacaaaagaataccaatcatttattgacaataacttcactattgatcaagtatgcaatatatcatcttttcactaaataagtagtaataatgattcaacaatgtcgagatatatggacgataataatttagttcatggaaatatcgctatgattggtatgaatgactccgctaactctgtggggcgcgcagtgctttccccacatagaataaattagcattccgactgtgataataataccaagtataaacgccataatactcaatactttccatgtacgagtgggactggtagacttactaaagtcaataaaggcgaagatacacgaaagaatcaaaagaatgattccagcgattagcacgccggaaaaataatttccaatcataagcatcatgtccatttaactaataaaaattttaaatcgccgaatgaacaaagtggaatataaaccatataaaaacaatagtttgtactgcaaaaataatatctatttttgttttcgaagatatggtaaaattaaatagtagtacacagcatgttataactaacagcagcaacggctcgtaattacttatcatttactagacgaaaaggtggtgggatattttcttgctcaaataatacgaatatatcacccatccattttatgcgatgtttatatactctaatctttaatagatctatagacgacgggtttaccaacaatatagattttatcgattcatctaatttaaacccttccttaaacgtgaatgatctattatctggcataacgatgaccctacctgatgaatcggacaatgtactgggccatgtagaataaattatcaacgaattatcgtctacgaacatttatatcatttgttttaattttaggacgcgaataaatagatataaaatagaaaataacagatattacaaccagtgttatggccgcgcccaaccaggtaggcagttttattttatcttttactacaggttctcctggatgtacgtcaccaacggcggacgtagttctagtacaattagacgtaagttccgcttgggaattttttaacgctaaagagttaacgttaatcgtgcacccaacgtatttacatctagttctttgaacatcttgattataatataaccattttctatctctagattcgtcggtgcactcatgtaaccaacataccctaggtcctaaatatttatctccggaattagattttggataattcgcgcaccaacaatttctatttcctttatgatcgttacaaaagacgtataatgccgtatccccaaaagtaaaataatcaggacgaataattctaataaactcagaacaatatctcgcatccatatgtttggagcaaatatcggaataagtagacatagccggtttccgttttgcacgtaaccattctaaacaattggggtttccaggatcgtttctacaaaatccagtcatgaaatcgtcacaatgttctgtcttgtaattattattaaatatttttggacagtgtttggtatttgtcttagaacaacattttgccacgctatcactatcgcccaggagataatccttttttataaaatgacatcgttgcccggatgctatataatcagtagcgtgttttaaatccttaatatattcaggagttacctcgttctgataatagattaatgatccaggacgaaatttgaaagaactacatggttctccatgaattaatacatattgtttagcaaattcaggaactataaaactactacaatgatctatcgacataccatctatcaaacaaaacttgggtttaatttctcccggagatgtttcataatagtacgtataactttcttctgcaaacttaacagctctattatattcaggataattaaaacctaattccatatatttgtctcgtatatctgctattcctggtgctattttgattctattaagagtaacagctgcccccattcttaataatcgtcagtatttaaactgttaaatgttggtatatcaacatctaccttatttcccgcagtataaggtttgttgcaggtatactgttcaggaatggttacatttatacttcttctatagtcctgtctttcgatgttcatcacatatgcaaagaacagaataaacaaaataatgtaagaaataatattaaatatctgtgaattcgtaaatacattgattgccataataattacagcagctacaatacacacaatagacattcccacagtgttgccattacctccacgatacatttgagttactaagcaataggtaataactaagctagtaagaggcaatagaaaagatgagataaatatcatcaatatagagattagaggagggctatatagagccaagacgaacaaaatcaaaccgagtaacgttctaacatcattatttttgaagattcccaaataatcattcattcctccataatcgttttgcatcatacctccatctttaggcataaacgattgctgctgttcctctgtaaataaatctttatcaagcactccagcacccgcagagaagtcgtcaagcatattgtaatatcttaaataactcatttatatattaaaaaatgtcactattaaagatggagtataatctttatgccgaactaaaaaaaatgacttgtggtcaacccctaagtctttttaacgaagacggggatttcgtagaagttgaaccgggatcatcctttaagtttctgatacctaagggattttacgcctctccttccgtaaagacgagtctagtatttgaaacattaacaacgaccgataataaaatcactagtatcaatccaacaaatgcgccaaagttatatcctcttcaacgcaaagtcgtatctgaagtagtttctaatatgaggaaaatgatcgaatcaaaacgtcctctatacattactcttcacttggcgtgtggatttggtaagactattaccacgtgttatcttatggctacacacggtagaaaaaccgtcatttgcgtacccaataaaatgttaatacatcaatggaagacacaggtagaggcagtcggattggaacataagatatccatagatggagtaagtagtctattaaaggaactaaagactcaaagtccggatgtattaatagtagtcagtagacatctgacaaacgatgccttttgtaaatatatcaataagcattatgatttgttcatcttggatgaatcacatacgtataatctgatgaacaatacagcagttacaagatttttagcgtattatcctccgatgatgtgttattttttaactgctacacctagaccagctaaccgaatttattgtaacagtattattaatattgccaagttatccgatctaaaaaaaactatctatgcggtagatagtttttttgagccatattccacagacaatattagacatatggtaaaacgactagatggaccatctaataaatatcatatatataccgagaagttattatctgtagacgagcctagaaatcaacttattcttaataccctggtagaagaattcaagtcaggaactattaatcgcattttagttattactaaactacgtgaacatatggtattattctacaaacgattattagatcttttcggaccagaggttgtatttataggagacgcccaaaatagacgtactccagatatggtcaaatcaatcaaggaactaaatagatttatattcgtatccaccttattttattccggtactggtttagatattcctagtttggattcgttgttcatttgctcggcagtaatcaacaatatgcaaatagagcaattactagggagggtatgtcgagaaacagaactattagataggacggtatatgtatttcctaacacatccatcaaagaaataaagtacatgataggaaatttcatgcaacgaattattagtctgtctgtagataaactaggatttaaacaagaaagttatcggaaacatcaagaatccgatcccacttctgtatgtacaacatcctccagagaagaacgtgtattaaatagaatatttaactcgcaaaatcgttaagaagtttaagcgacgatccgcatgctgcgcaggccagtgtattacccctcatagtattaatataatccaatgatacttttgtgatgtcggaaatcttaaccaatttagactgacaggcagaacacgtcatgcaatcatcatcgtcatcgataactgtagtcttgggcttctttttgcggctcttcattccggaacgcacattggtgctatccatttaggtagtaaaaaataagtcagaatatgccctataacacgatcgtgcaaaacctggtatatcgtctctatctttatcacaatatagtgtatcgacatctttattattattgacctcgtttatcttggaacatggaatgggaacatttttgttatcaacggccacctttgccttaattccagatgttgtaaaattataactaaacagtctatcatcgacacaaatgaaattcttgtttagacgtttgtagtttacgtatgcggctcgttcgcgtctcattttttcagatattgcaggtactataatattaaaaataagaatgaaataacataggattaaaaataaagttatcatgacttctagcgctgatttaactaacttaaaagaattacttagtctgtacaaaagtttgaaattttcagattctgcggctatagaaaagtataattctttggtagaatggggaacatctacttactggaaaataggcgtgcaaaaggtagctaatgtcgagacgtcaatatctgattattatgatgaggtaaaaaataaaccgtttaatattgatccgggctattacattttcttaccggtatattttgggagcgtctttatttattcgaagggtaaaaatatggtagaacttggatctggaaactcttttcaaataccagatgatatgcgaagtgcgtgtaacaaagtattagacagcgataacggaatagactttctgagatttgttttgttaaacaatagatggataatggaagatgctatatcaaaatatcagtctccagttaatatatttaaactagctagtgagtacggattaaacatacccaaatatttagaaattgaaatagaggaagacacattatttgacgacgagttatactctattatagaacgctcttttgatgataaatttccaaaaatatccatatcgtatattaagttgggagaacttaggcggcaagttgtagactttttcaaattctcgttcatgtatattgagtccatcaaggtagatcgtataggagataatatttttattcctagcgttataacaaaatcaggaaaaaagatattagtaaaagatgtagaccatttaatacgatctaaggttagagaacatacatttgtaaaagtaaaaaagaaaaacacattttccattttatacgactatgatgggaacggaacagaaactagaggagaagtaataaaacgaattatagacactataggacgagactattatgttaacggaaagtatttctctaaggttggtagtgcaggcttaaagcaattgactaataaattagatattaatgagtgcgcaactgtcgatgagttagttgatgagattaataaatccggaactgtaaaacgaaaaataaaaaaccaatcagcatttgatttaagcagagaatgtttgggatatccagaagcagattttataacgttagttaataacatgcggttcaaaatagaaaattgtaaggttgtaaatttcaatattgaaaatactaattgtttaaataacccgagtattgaaactatatatggaaactttaaccagttcgtctcaatctttaatatcgtcaccgatgtcaaaaaaagattattcgagtgaaataatatgcgcctttgatataggtgcaaaaaatcctgccagaactgttttagaagtcaaggataactccgttagggtattggatatatcaaaattagactggagttctgattgggaaaggcgcatagctaaagatttgtcacaatatgaatacactacagttcttctagaacgtcagcctagaaggtcgccgtatgttaaatttatctattttattaaaggctttttatatcatacatcggctgccaaagttatttgcgtctcgcctgtcatgtctggtaattcatatagagatcgaaaaaagagatcggtcgaagcatttcttgattggatggacacattcggattgcgagactccgttccggatagacgcaaattagacgatgtagcggatagtttcaatttggctatgagatacgtattagataaatggaatactaattatacaccttataataggtgtaaatctagaaattacataaaaaaaatgtaataacgttagtaacgccattatggataatctatttacctttctacatgaaatagaagatagatatgccagaactatttttaactttcatctaataagttgcgatgaaataggagatatatatggtcttatgaaagaacgcatttcctcagaggatatgtttgataatatagtatataataaagatatacatcctgccattaagaaactagtgtattgcgacatccaacttactaaacacattattaatcagaatacgtatccggtatttaacgattcttcacaagtgaaatgttgtcattatttcgacataaactcagataatagcaatattagctctcgtacagtagagatatttgagagggaaaagtcatctcttgtatcatatattaaaactaccaataagaagagaaaggtcaattacggcgaaataaagaaaactgttcatggaggcactaatgcaaattacttttccggtaaaaagtctgacgagtatctgagtactacagttagatccaacattaatcaaccttggatcaaaaccatttctaagagaatgagagtagatatcattaatcactctatagtaacgcgtggaaaaagctctatattacaaactatagaaattatttttactaatagaacatgtgtgaaaatattcaaggattctactatgcacattattctatccaaggacaaggatgaaaaggggtgtatacacatgattgacaaattattctatgtctattataatttatttctgttgttcgaagatatcatccaaaacgagtactttaaagaagtagctaatgttgtaaaccacgtacttacggctacggcattagatgagaaattattcctaattaagaaaatggctgaacacgatgtttatggagttagcaatttcaaaatagggatgtttaacctgacatttattaagtcgttggatcataccgttttcccctctctgttagatgaggatagcaaaataaagttttttaaggggaaaaagctcaatattgtagcattacgatctctggaggattgtataaattacgtgactaaatccgagaatatgatagaaatgatgaaggaaagatcgactattttaaatagcatagatatagaaacggaatcggtagatcgtctaaaagaattgcttctaaaatgaaaaaaaacactgattcagaaatggatcaacgactagggtataagtttttggtgcctgatcctaaagccggagttttttatagaccgttacatttccaatatgtatcgtattctaattttatattgcatcgattgcatgaaatcttgaccgtcaagcggccactcttatcgtttaagaataatacagaacgaattatgatagaaattagcaatgttaaagtgactcctccagattactcacctataatcgcgagtattaaaggtaagagttatgatgcattagccacgttcactgtaaatatctttaaagaggtaatgaccaaagagggtatatccatcactaaaataagtagttatgagggaaaagattctcatttgataaaaattccgctactaataggatacgggaataaaaatccacttgatacagccaagtatcttgttcctaatgtcataggtggagtctttatcaataaacaatctgtcgaaaaagtaggaattaatctagtagaaaagattacaacatggccaaaatttagggttgttaagccaaactcattcactttctcgttttcctccgtatcccctcctaatgtattaccgacaagatatcgccattacaagatatctctggatatatcacaattggaagcgttgaatatatcatcgacaaagacatttataacggtcaatattgttttgctgtctcaatatttatctagagtgagtctagaattcattagacgtagtttatcatacgatatgcctccagaagttgtctatctagtaaacgcgataatagatagtgctaaacgaattactgaatctattactgactttaatattgatacatacattaatgacctggtggaagctgaacacattaaacaaaaatctcagttaacgatcaacgagttcaaatatgaaatgctgcataactttttacctcatatgaactatacacccgatcaactaaagggattttatatgatatctttactaagaaagtttctctactgtatctaccacacttctagatatccagatagagattcgatggtttgtcatcgcatcctaacgtacggcaaatattttgagacgttggcacatgatgaattagagaattacataggcaacatccgaaacgatatcatgaacaatcacaagaacagaggcacttacgcggtaaacattcatgtactaacaactcccggacttaatcacgcgttttctagcttattgagtggaaagttcaaaaagtcagacggtagttatcgaacacatcctcactattcatggatgcagaatatttctattcctaggagtgttggattttatccggatcaagtaaagatttcaaagatgttttctgtcagaaaataccatccaagtcaatatctttacttttgttcatcggacgttccggaaagaggtcctcaggtaggtttagtatctcaattgtctgtcttgagttccattacaaatatactaacgtctgagtatttggatttggaaaagaaaatttgtgagtatatcagatcatattataaagatgatataagttactttgaaacaggatttccaatcactatagaaaatgctctagtcgcatctcttaatccaaatatgatatgtgattttgtaactgactttagacgtagaaaacggatgggattcttcggtaacttggaggtaggtattactttagttagggatcacatgaatgaaattcgcattaatattggagcgggaagattagtcagaccattcttggttgtggataacggagagctcatgatggatgtgtgtccggagttagaaagcagattagacgacatgacattctctgacattcagaaagagtttccgcatgtcatcgaaatggtagatatagaacaatttacttttagtaacgtatgtgaatcggttcaaaaatttagaatgatgtcaaaggatgaaagaaagcaatacgatttatgtgactttcctgccgaatttagagatggatatgtggcatcttcattagtgggaatcaatcacaattctggacccagagctattcttggatgtgctcaagctaaacaagctatctcttgtctgagttcggatatacgaaataaaatagacaatggaattcatttgatgtatccagagaggccaatcgtgattagtaaggctttagaaacttcaaagattgcggctaattgcttcggccaacatgttactatagcattaatgtcgtacaaaggtatcaatcaagaggatggaattatcatcaaaaaacaatttattcagagaggcggtctcgatatagttaccgcaaagaaacatcaagtagaaattccgttggaaaactttaataacaaagaaagagataggtctaacgcctattcaaaattagaaagtaatggattagttagactgaatgctttcttggaatccggagacgctatggcacgaaatatctcatcaagaactcttgaagatgattttgctagagataatcagattagcttcgatgtttccgagaaatataccgatatgtacaaatctcgcgttgaacgagtacaagtagaacttactgacaaagttaaggtacgagtattaaccatgaaagaaagaagacccattctaggagataaatttaccactagaacgagtcaaaagggaacagtcgcgtatgtcgcggatgaaacggaacttccatacgacgaaaatggtatcacaccagatgtcattattaattctacatccatcttctctagaaaaactatatctatgttgatagaggttattttaacagccgcatattctgctaagccgtacaacaataagggagaaaaccgacctgtctgttttcctagtagtaacgaaacatccatcgatacatatatgcaattcgctaaacaatgttatgagcattcaaatccgaaattgtccgatgaagaattatcggataaaatcttttgtgaaaagattctctatgatcctgaaacggataagccttatgcatccaaagtattttttggaccaatttattacttgcgtctgaggcatttaactcaggacaaggcaaccgttagatgtagaggtaaaaagacgaagctcattagacaggcgaatgagggacgaaaacgtggaggaggtatcaagttcggagaaatggagagagactgtttaatagcgcatggcgcagccaatactattacagaagttttaaaagactcagaagaggattatcaagatgtgtatgtttgtgaaaattgtggagacatagcagcacaaatcaagggtattaatacatgtcttagatgttcaaaacttaatctctctcctctcttaacaaaaattgataccacgcacgtatctaaagtatttcttactcaaatgaacgccagaggcgtaaaagtcaaattagatttcgaacgaaggcctccttcgttttataaaccattagataaagttgatctcaagccgtcttttctggtgtaatattctagtttggtagtagatacatatcaatatcatcaaattcgagatccgaattataaaatgggcgtggattgttaactatagaatcggacgtctgatattcgaaaatctgtggagttttaggttttggtggaggtgtaactgctacttgggatactgaagtctgatattcagaaagctgggggatgttctggttcgacatccaccgatggtgtcacatcactaatcggttcggtaacgtctgtggatggaggtgctacttctacagaacctgtagcctcagttgtcaacggagatacatttttaatgcgaggaaatgtataatttggtaatggtttctcatgtggatctgaagaagaggtaagatatctactagaaagataccgatcacgttctagttctcttttgtagaacttaactttttctttctcagcatctagttgatattccaacctcttcacgttactacgttcagattccaattcacgttcgcatgggttacctccgcagtttttacgagcgatttcacgttcagccttcatgcgtctctccttctctctatcgagtttatcagagcagtctttctgaaggcgatcgaactccataaatttctccaacgctttgattgtttccatagatttccgaagttcagcttttaggactgtgattctttttctttcgaattcacagctggatgtgcaaccgtttccattaccgccatctctaagtttcttttctagatcggcaacatttcatccccatgccttttacattcctcgagtctactgtcgtcgaaatatcgttccagctccttttcgacatcaataactttagcacgttgtctctcaagctctcttttgtagttatctgattccctggcacgtttaagatcttcatgcaattgagtcagctcttaacacaatctcttgcttcttcgtcatagtacttacaatcactatgggatccattgttaccacgtctacactcggcgagctcgcgtttaagagattcaatttcccgtttgtattggtccatgtttccattgctaccaccattagatttacaggctgctagttgtcgttcgagatcagaaatacgggttttcttggaattgatttcgtcgatgtacttggcatcgaaacacttattaagttctttttccaattctacgattttatttctttcgcgagtcaattccctcctgtagtaactatctgttttgtcagattcacgctctctacgtagactttcttgcaagttactaatttgttccctagcacgtccgagtttagttttatatgctgaatagagttctgattcatcctttgagcagatctctagcgatcgtttaagattcctgattctagtctttagcctatttacctcctcagaagatgttccgttaccgttgcgtttacactcgttaagctgtctatcaagatccatgattctatctctaagacgttgcatctctctttccatatcagcattgctttcattattacgtctgcagtcactcaactgtctttcaatatctgagattctatctctaagacgtcgcatctctctctgtttcggcattggtttcattattacgtctacagtcgttcaactgtctttcaagatctgatattctagattggagtctgctaatctctgtagcattttcacggcattcactcagttgtctttcaagatctgagattttagattggagtctgctaatctctgtaagatttcctcctccgctctcgatgcagtcggtcaacttattctctagttctctaatacgcgaacgcagtgcatcaacttcttgcgtgtcttcctggttgcgtgtacattcatcgagtctagattcgagatctctaacgcgtcgtcgttcttcctcaagttctctgcgtactacagaaagcgtgtccctatcttgttgatatttagcaatttctgattctagagtactgattttgcttacgtagttactaatagttgtcttggccttatcaagatcctccttgtatttgtcgcattccttgatatccctacgaagtctggacagttcccattcgacattacgacgtttatcgatttcagctcggagatcgtcatcgcgttgttttagccacatacgactgagttcaagttctcgttgacaagatccatctacttttccattcctaatagtatccagttccttttctagttctgaacgcatttctcgttccctatcaagcgattctctcaattctcggatagtcttcttatcaatttctaataaatctgaaccatcatctgtcccattttgaatatccctgtgttctttgatctcttttgtaagtcggtcgattctttcggttttataaacagaatccctttccaaagtcctaatcttactgagtttatcactaagttctgcattcaattcggtgagttttctcttggcttcttccaactctgttttaaactctccactatttccgcattcttcctcgcatttatctaaccattcaattagtttattaataactagttggtaatcagcgattcctatagccgttcttgtaattgtgggaacataattaggatcttctaatggattgtatggcttgatagcatcatctttatcattattagggggatggacaaccttaattggttggtcctcatctcctccagtagcgtgtggttcttcaataccagtgttagtaataggcttaggcaaatgcttgtcgtacgcgggcacttcctcatccatcaagtatttataatcgggttctacgtctgaatattcttttctaagagacgcgacttcgggagttagtagaagaactctgtttctgtatctatcaacgctggaatcaatactcaagttaaggatagcgaatacctcatcgtcatcatccgtatcttctgaaacaccatcatatgacatttcatgaagtctaacgtattgataaatagaatcagatttagtattaaacagatccttaacctttttagtaaacgcatatgtatattttagatctccagatttcataatatgatcacatgccttaaatgtcagtgcttccatgatataatctggaacactaatgggtgacgaaaaagatacagcaccatatgctacgttgataaataaatctgaaccactaagtagataatgattaatgttaaggaagaggaaatattcagtatatagatatgccttagcatcatatcttgtactaaacacgctaaacagtttattgatgtgatcaatttccaacagaataattagagcagcgggaataccaacaaacatattaccacatccgtattttctatgaatatcacatatcatgttaaaaaatcttgatagaagagcgaatatctcgtctgacttaatgagtcgtagttcagcagcaacataagtcataactgtaaatagaacatactttcctgtagtgttgattctagactccacatcaacaccattattaaaaatagttttatatacatctttaatctgctctccgttaatcgtcgaacgttctagtatacggaaacactttgatttcttatctgtagttaatgacttagtgatatcacgaagaatattacgaattacatttcttgtttttcttgagagacctgattcagaactcaactcatcgttccatagtttttttacctcagtggcgaaatctttggagtgcttggtacatttttcaataaggttcgtgacctccatttattataaaaaattttattcaaaacttaactacaatcgggtaattataaaatcgtagatctcccatgtggtggaatactaccatctatcgcatgtggatggacagtaggtaatggccatgggaacagtaatgtttgcatatttatctttcttgccagtattactgcatattgtcccaatgtttcgatgtgatgttctaacctatcaactgccgctgtatcacaacaatagtgtccgatgaaattaagattatgatccaatgtgtttaatatatgattatcaagtcttatacgatccgcgtcttttttgacaggatcaggttcttctacaggaagaagtttcggcctcttatgatattcatgtctgggaaacggtggtctagggtgaggctccggtatcggagtgggttttggattataatcatcatcgtctatgacatcatcttcgacttcgatatttattttgctatcttgatgatgtcctgtatcagttgcattttcagcactcgactgaatattagcgcattcattgtctattattaccatatttctaaacccaaaatgtatgtgttgaacatcagtactatcgttgatgagtcttatagcatgaattcgcttatcgttatcgggtttatcttctgtcaccttagcaattccttttttattaaactctacataatcatatccatttctattgtttgttctaatataaacgagtatagcatcattgctaaatttttcaatagtatcgaaaacagaatatcctaaaccatataatatatattcagggacactcaaactaaatgtccaggattctcctaaatacgtaaactttaatagtgcgaaatcattcaaaaatctaccacttatagatagatagtacataaatgcgtatagtagtctacctatctctttattatgaaaaccggcattacgatcatatatgtcgtgatatacctgtgatccgtttacgttaaaccataaatacatgggtgatcctataaacatgaatttatttctaattctcagagctatagttaattgaccgtgtaatatttgcttacatgcatacttgatacgctcattaataaaatttttatcattgctcgttatctcagaatcgtatatataaggagtaccatcgtgattcttaccagatattatacaaaatactatatataaaatatattgaccaacgttagtaatcatataaatgtttaacgttttaaattttgtattcaatgatccattatcatacgctagcatggtcttatgatattcattctttaaaatataatattgtgttagccattgcattggggctcctaatggagattttttattctcatccattttaggataggctttcataaagtccctaataacttcgtgaataatgtttctatgttttctactgatgcatgtatttgcttcgatttttttatcccatgtttcatctatcatagatttaaacgcagtaatgctcgcaacattaacatcttgaaccgttggtacaattccgttccataaatttataatgttcgccatttatataactcattttttgaatatacttttaattaacaaaagagttaagttactcatatgggcgccgtccagtctgaacatcaatctttttagccagagatatcatagccgctcttagagtttcagcgtgattttccaacctaaatagaacttcatcgttgcgtttacaacacttttctatttgttcaaactttgttgttacattagtaatctttttttccaaattagttagccgttgtttgagagtttcctcattgtcgtcttcatcggctttaacaattgcttcgcgtttagcctctggctttttagcagcctttgtagaaaaaaattcagttgctggaattgcaagatcgtcatctccggggaaaagagttccgtccatttaaagtacagattttagaaactgacactctgcgttatttatatttggtacaacacatggattataaatatcgatgttaataacatcagaaaatgtaaagtctatacattgttgcatcgtgttaaattttctaatggatctagtattattgggtccaacttctgcctgaaatccaaatatggaagcggatacaaaaccgtttcctggataaaccacacatctccacttttgctttacatcagaaattgtgtcgttgacatcttgaactctcctatctaatgccggtgttccacctatagattttgaatattcgaatgctgcatgagtagcattaaattccttaatattgccataattttcatatattgagtaaccctggataaaaagtaaacacaccgcagccgtcgctaccacaataaaaaaaattgatagagagttcatttataatctattagaagctgacaaaatttttttacacgcatcagacaatgctttaataaatagttcaacatctacttttgtcatatcgaaccgatggtatgattctaacctagaattacatccgaaaaagttgactatgttcatagtcattaagtcattaacaaacaacattccagactctggattataagacgatactgtttcgtcacaattacctaccttaatcatgtgattatgaatattggctattagagcaccttctaagaaatctataatatctttgaaacacgatttaaaatcaaaccacgaatatacttctacgaagaaagttagtttacccataggagaaataactataaatggagatctaaatacaaaatccggatctatgatagttttaacattattatattctctattaaatacctccacatctaaaaatgttaattttgaaactatgtcttcgtttattaccgtacctgaactaaacgctataagctctattgtttgagaactctttaaacgatattcttgaaatacatgtaacaaagtttcctttaactcggtcggtttatctaccatagttacagaatttgtatccttatctataatataataatcaaaatcgtataaagttatataattatcgcgttcagattgggatcttttcaaatagactaaaaaccccatttctctagtaagtatcttatgtatatgtttgtaaaatatcttcatggtgggaatatgctctaccgcagttagccattcctcattgacagcggtagatgtattagacaaaactattccaatgtttaacaagggccattttacgagattattaaatccttgtttgataaatgtagccaatgagggttcgagttcaacgacgattgaattctcttcccgcggatgctgcatgatgaacgacgggatgttgttcgattgatttggaattctttttcgactttttgtttatattaaatattttaaaatttatagcggatagcaattcatgtaccacggataatgtagacgcgtattgcgcatcgatatctttattattagataaatttatcaataaatgtgagaagtttgcctcgttaaggtcttccatttaaatattatataaacatttgtgtttgtatcttattcgtcttttatggaatagttttttactagtaaagctgcaattacacactttgtccgtaaaacataaatataaacaccagcttttatcaatcgttccaaaaagtcgacggcggacatttttaacatggcatctattttaaatacacttaggtttttggaaaaaacatcattttataattgtaacgattcaataactaaagaaaagattaagattaaacataagggaatgtcatttgtattttataagccaaagcattctaccgttgttaaatacttgtctggaggaggtatatatcatgatgatttggttgtattggggaaggtaacaattaataatctaaagatgatgctattttacatggatttatcatatcatggagtgacaagtagtggagcaatttacaaattgggatcgtctatcgatagactttctctaaataggactattgttacaaaagttaataattatgatgatacattttttgacgacgatgattgatcgctattgcacaattttgtttttttactttctaatatagcgtttagattctttttcatgtgcgaatattgatttactaaaatatcgatgtttaacttttgttctatgacgtccttatcagcggtatcggtacatatacgtaattcaccttcacaaaatacggagtcttcgataataatagccaatcgattattggatctagctgtctgtatcatattcaacatgtttaatatatcctttcgtttcccctttacaggcatcgatcgtagcatattttccgcgtctgagatggaaatgttaaaactacaaaaatgcgtaatgttagcccgtcctaatattggtacgtgtctataagtttggcatagtagaataatagacgtgtttaaatgccttccaaagtttaagaattctattagagtattgcattttgatagtttatcacctacatcatcaaaaataagtaaaaagtgtgctgattttttatgattttgtgcgacagcaatacatttttctatgttacttttagttcgtatcagattatattctagagattcctgactactaacgaaattaatatgatttggccaaatgtatccatcataatctgggttataaacgggtgtaaacaagaatatatgtttatattttttaactagtgtagaaaacagagatagtaaatagatagtttttccagatccagatcctcccgttaaaaccattctaaacggcatttttaataaattttctcttgaaaattgtttttcttggaaacaattcataattatatttacagttactaaattaatttgataataaatcaaaatatggaaaactaaggtcgttagtagggaggagaacaaagaaggcacatcgtgacataaataacatttattatcatgatgacaccagaaaacgacgaagagcagacatctgtgttctccgctactgtttacggagacaaaattcaaggaaagaataaacgcaaacgcgtgattggtctatgtattagaatatctatggttatttcactactatctatgattaccatgtccgcgtttctcatagtgcgcctaaatcaatgcatgtctgctaacgaggctgctattactgacgccgctgttgccgttgctgctgcatcatctactcatagaaaggttgcgtctagcactacacaatatgatcacaaagaaagctgtaatggtttatattaccagggttcttgttatatattacattcagactaccagttattctcggatgctaaagcaaattgcactgcggaatcatcaacactacccaataaatccgatgtcttgattacctggctcattgattatgttgaggatacatggggatctgatggtaatccaattacaaaaactacatccgattatcaagattctgatgtatcacaagaagttagaaagtatttttgtgttaaaacaatgaactaatatttatttttgtacattaataaatgaaatcgcttaatagacaaactgtaagtaggtttaagaagttgtcggtgccggccgctataatgatgatactctcaaccattattagtggcataggaacatttctgcattacaaagaagaactgatgcctagtgcttgcgccaatggatggatacaatacgataaacattgttatttagatactaacattaaaatgtctacagataatgcggtttatcagtgtcgtaaattacgagccagattgcctagaccggatactagacatctgagagtattgtttagtattttttataaagattattgggtaagtttaaaaaagaccaatgataaatggttagatattaataatgataaagatatagatattagtaaattaacaaattttaaacaactaaacagtacgacggatgctgaagcgtgttatatatacaagtctggaaaactggttaaaacagtatgtaaaagtactcaatctgtactatgtgttaaaaaattctacaagtgacaacaaaaaatgaattaataataagtcgttaacgtacgccgccatggacgccgcgtttgttattactccaatgggtgtgttgactataacagatacattgtatgatgatctcgatatctcaatcatggactttataggaccatacattataggtaacataaaaactgtccaaatagatgtacgggatataaaatattccgacatgcaaaaatgctactttagctataagggtaaaatagttcctcaggattctaatgatttggctagattcaacatttatagcatttgtgccgcatacagatcaaaaaataccatcatcatagcatgcgactatgatatcatgttagatatagaagataaacatcagccattttatctattcccatctattgatgtttttaacgctacaatcatagaagcgtataacctgtatacagctggagattatcatctaatcatcaatccttcagataatctgaaaatgaaattgttgtttaattcttcattctgcatatcagacggcaatggatggatcataattgatgggaaatgcaatagtaattttttatcataaaagttgtaaagtaaataataaaacaataaatattgaactagtagtacgtatattgagcaatcagaaatgatgctggtacctcttatcacggtgaccgtagttgcgggaacaatattagtatgttatatattatatatttgtaggaaaaagatacgtactgtctataatgacaataaaattatcatgacaaaattaaaaaagataaagagttctaattccagcaaatctagtaaatcaactgatagcgaatcagactgggaggatcactgtagtgctatggaacaaaacaatgacgtagataatatttctaggaatgagatattggacgatgatagcttcgctggtagtttaatatgggataacgaatccaatgtcatggcgcctagcacagaacacatttacgatagtgttgctggaagcacgctgctaataaataatgatcgtaatgaacagactatttatcagaacactacagtagtaattaatgagacggagactgttgaagtacttaatgaagataccaaacagaatcctaactattcatccaatcctttcgtaaattataataaaaccagtatttgtagcaagtcaaatccgttcattacagaactcaacaataaatttagtgagaataatccgtttagacgagcacatagcgatgattatcttaataagcaagaacaagatcatgaacacgatgatatagaatcatcggtcgtatcattggtgtgattagtttcctttttataaaattgaagtaatatttagtattattgctgccgtcacgttgtacaaatggagatattccctgtattcggcatttctaaaattagcaattttattgctaataatgactgtagatattatatagatacagaacatcaaaaaattatatctgatgagatcaatagacagatggatgaaacggtacttcttaccaacatcttaagcgtagaagttgtaaatgacaatgagatgtaccatcttattccccatagactatcgactattatactctgtattagttctgtcggaggatgtgttatctctatagataatgacatcaatgacaaaaatattctaacatttcccattgatcatgctgtaatcatatccccactgagtaaatgtgtcgtagttagcaagggtcctacaaccatattggttgttaaagcggatatacccagcaaacgattggtaacatcgtttacaaacgacatactgtatgtaaacaatctgtcactgattaattatttgccgttgtctgtattcattattagacgagtcaccgactatttggatagacacatatgcgatcagatatttgcgaataataagtggtattccattataaccatcgacgataagcaatatcctattccatcaaactgtataggtatgtcctctgccaagtacataaattctagcatcgagcaagatactttaatacatgtttgtaacctcgagcatccattcgacttagtatacaaaaaaatgcagtcgtacaattctgtacctatcaaggaacaaatattgtacggtagaattgataatataaatatgagcattagtatttctgtggattaatagatttctagtatggggatcattaatcatctctaatctctaaatacctcataaaacgaaaaaaaagctattatcaaatactgtacggaatggattcattctcttctctttttatgaaactctgttgtatatctactgataaaactggaagcaaaaaatctgataaaaagaataagaataagatcaaggattatatggaacacgattattataaaataacaatagttcctggttcctcttccacgtctactagctcgtggtattatacacatgcctagtaatagtctctttgcgttgacggaaagcagactagaaataacaggctaaaatgttcagacaccataatagttcccaacccagataataacagagtaccatcaacacattcctttaaactcaatcccaaacccaaaaccgttaaaatgtatccggccaattgatagtagataatgaggtgtacagcgcatgataatttacacagtaaccaaaatgaaaatactttagtaattataagaaatatagatggtaacgtcatcatcaacaatccaataatatgccggagagtaaacattgacggataaaacaaaaatgctccgcataactctatcatggcaataacacaaccaaatacttgtaagattcctaaattagtagaaaatacaacggatatcgatgtataagtgatctcgagaaataataagaataaagtaatgcccgtaaagataaacatcaacattgtttggtaatcattaaaccaattagtatgaagttgaactaatttcacagtagattttattccagtgttatcctcgcatgtatacgtacctggtaagatatctttatattctataatcaatgagacatcactatccgataacgaatgaagtctagcactagtatgccatttacttaatatggtcgtcttggaagttttattataagttaaaatatcatggttgtccaatttccatctaatatactttgtcggattatctatagtacacggaataatgatggtattattacatgctgtatactctatagtctttgtagatgttataatcataaaagtacagaggtatatcaacgatattctaactcttgacattttttatttatttaaaatgatacctttgttatttattttattctattttgctaacggtatcgaatggcataagtttgaaacgagtgaagaaataatttctacttacttattagacgacgtattatacacgggtgttaatggggcggtatacacattttcaaataataaactaaacaaaactggtttagctaatactaattatatcacaacatctataaaagtagaggatgcggataaggatacattagtatgcggaaccaataacggaaatcccaaatgttggaaaatagacggttcagacgacccaaaacatagaggtagaggatacgctccttatcaaaatagcaaagtaacgataatcagtcacaacggatgtgtactatctgacataaacatatcaaaagaaggaattaaacgatggagaagatttgacggaccatgtggttatgatttatacacggcggataacgtaattccaaaagatggtttacgaggagcattcgtcgataaagatggtacttatgacaaagtttacattcttttcactgatactatcggctcaaagagaattgtcaaaattccgtatatagcacaaatgtgcctaaacgacgaaggtggtccatcatcattgtctagtcatagatggtcgacgtttctcaaagtcgaattagaatgtgatatcgacggaagaagttatagacaaattattcattctagaactataaaaacagataatgatacgatactatatgtattcttcgatagtccgcattatgtacctattctatgaataccattaaacaatctttttctacgtcaaaattggaaggatatacaaagcaattgccgtctccagctcctggtatatgtctaccagctggaaaagttgttccacataccacgtttgaagtcatagaaaaatataatgtactagatgatattataaagcctttatctaaccaacctatcttcgaaggaccgtctggtgttaaatggttcgatataaaggagaaggaaaatgaacatcgggaatatagaatatacttcataaaagaaaattctatatattcgttcgatacaaaatctaaacaaactcgtagctcgcaagtcgatgcgcgactattttcagtaatggtaacttcgaaaccgttatttatagcagatatagggataggagtaggaatgccacaaatgaaaaaaatacttaaaatgtaatcttaatcgagtacaccacacgacaatgaacaaacataagacagattatgctggttatgcttgctgcgtaatatgcggtctaattgttggaattatttttacagcgacactattaaaagttgtagaacgtaaattagttcatacaccatcaatagataaaacgataaaagatgcatatattagagaagattgtcctactgactggataagctataataataaatgtatccatttatctactgatcgaaaaacctgggaggaaggacgtaatgcatgcaaagctctaaatccaaattcggatctaattaagatagagactccaaacgagttaagttttttaagaagcattagacgcggatattgggtaggagaatccgaaatattaaaccagacaaccccatataattttatagctaagaatgccacgaagaatggaactaaaaaacggaaatatatttgtagcacaacgaatactcccaaactgcattcgtgttacactatataacaattacactacatttttatcataccactacttcggttagatgttttagaaaaaaataaatatcgccgtaccgttcttgtttttataaaaataacaattaacaattatcaaattttttctttaatattttacgtggttgaccattcttggtggtaaaataatctcttagtgttggaatggaatgctgtttaatgtttccacactcatcgtatattttgacgtatgtagtcacatcgtttacgcaatagtcagactgtagttctatcatgcttcctacattagaaggaggaacagttttaaagtctcttggttttaatctattaccgttagttttcatgaaatcctttgttttatccacttcacattttaaataaatgtccactatacattcttctgttaattttactagatcgtcatgggtcatagaatttataggttccgtagtccatggatccaaactagcaaacttcgcgtatacggtatcgcgattagtgtatacaccaactgtatgaaaattaagaaaacagtttaatagatcaacagaaatatttaatcctccgtttgatacagatgcaccatatttatggattttggattcacacgttgtttgtctgaggggttcgtctagcgttgcttctacataaacttctattcccatatattctttattgtcagaatcgcataccgatttatcatcatacactgtttgaaaactaaatggtatacacatcaaaataacaaatactaacgagtacattctgcaatattgttatcgtaattggaaaaatagtgttcgagtgagttggattatgtgagtattggattgtatattttattttatattttgtaataagaataaaatgctaatgtcaagtttattccaatagatgtcttattaaaaacatatataataaataacaatggctgaatggcataaaattatcgaggatatctcaaaaaataataagttcgaggatgccgccatcgttgattacaagactacaaagaatgttctagctgctattcctaacagaacatttgccaagattaatccgggtgaaattattcctctcatcactaatcgtaatattctaaaacctcttattggtcagaaatattgtattgtatatactaactctctaatggatgagaacacgtatgctatggagttgcttactgggtacgcccctgtatctccgatcgttatagcgagaactcataccgcacttatatttttgatgggtaagccaacaacatccagacgtgacgtgtatagaacgtgtagagatcacgctacccgtgtacgcgcaactggtaattaaaataaaaagtaatattcatatgtagtgtcaattttaaatgatgatgatgaaatggataatatccatattgacgatgtcaataatgccggtattggcatacagctcatcgatttttagatttcattcagaggatgtggaattatgttatgggcatttgtattttgataggatctataatgtagtaaatataaaatataatccgcatattccatatagatataattttattaatcgcacgttaaccgtagatgaactagacgataatgtcttttttacacatggttattttttaaaacacaaatatggttcacttaatcctagtttgattgtctcattatcaggaaacttaaaatataatgatatacaatgctcagtaaatgtatcgtgtctcattaaaaatttggcaacgagtacatctactatattaacatctaaacataagacttattctctacatcggtccacgtgtattactataataggatacgattctattatatggtataaagatataaatgacaagtataatggcatctatgattttactgcaatatgtatgctaatagcgtctacattgatagtgaccatatacgtgtttaaaaaaataaaaatgaactcttaattatgctatgctattagaaatggataaaatcaaaattacggttgattcaaaaattggtaatgttgttaccatatcgtataacttggaaaagataactattgatgtcacacctaaaaagaaaaaagaaaaggatgtattattagcgcaatcagttgctgtcgaagaggcaaaagatgtcaaggtagaagaaaaaaatattatcgatattgaagatgacgatgatatggatgtagaaagcgcataatacgatctataaaaataagtatataaatactttttatttactgtactcttactgtgtagtggtgataccctactcgattatttttttaaaaaaatacttattctgattcttctagccatttccgtgttcgttcgaatgccacatcgacgttaaagataggggagtagttgaaatctagttctgcattgttggtacgcacctcaaatgtagtgttggatatcttcaacgtatagttgttgagtagtgatggttttctaaatagaattctcttcatatcattcttgcacgcgtacatttttagcatccatcttggaattctagatccttgttctattcccaatggtttcatcaatagaagattaaacatatcgtacgaacacgatggagagtaatcgtagcaaaagtaagcatttcctttaatctcagatcccggatactggatatattttgcagccaacacgtgcatccatgcaacatttcctacatatacccggctatgcaccgcgtcatcatcgactgtacgatacataatgttaccgtgttgcttacattgctcgtaaaagactttcgtcaatttgtctccttctccgtaaattccagtgggtcttaggcaacaagtatacaattttgctccattcatgattacggaattattggctttcataaccagttgctcggccatacgtttactttttgcgtatacatgtcctggtgatatatcataaagggtatgctcatggccgatgaatggatcaccgtgtttatttggtcctattgcttccatgctactagtatagatcaaatacttgattcctaggtccacacaagctgccaatatagtctgtgttccataatagtttactttcatgatttcattatcggtgtattttccaaatacatccactagagcagccgtatgaataatcagatttaccccatctagcgcttctctcaccttatcaaagtcgtttatatcacattgtatatagtttataaccttaactttcgaggttattggttgtggatcttctacaatatctatgactctgatttcttgaacatcatctgcactaattaacagttttactatatacctgcctagaaatccggcaccaccagtaaccgcgtacacggccattgctgccactcataatatcagactacttattctattttactaaataatggctgtttgtataatagaccacgataatatcagaggagttatttactttgaaccagtccatggaaaagataaagttttaggatcagttattggattaaaatccggaacgtatagtttgataattcatcgttacggagatattagtcaaggatgtgattccataggcagtccagaaatatttatcggtaacatctttgtaaacagatatggtgtagcatatgtttatttagatacagatgtaaatatatctacaattattggaaaggcgttatctatttcaaaaaatgatcagagattagcgtgtggagttattggtatttcttacataaatgaaaagataatacattttcttacaattaacgagaatggcgtttgatatatcagttaatgcgtctaaaacaataaatgcattagtttacttttctactcagcaaaataaattagtcatacgtaatgaagttaatgatacacactacactgtcgaatttgatagggacaaagtagttgacacgtttatttcatataatagacataatgacaccatagagataagaggggtgcttccagaggaaactaatattggttgcgcggttaatacgccggttagtatgacttacttgtataataagtatagttttaaactgattttagcagaatatataagacacagaaatactatatccggcaatatttattcggcattgatgacactagatgatttggctattaaacagtatggagacattgatctattatttaatgagaaacttaaagtagactccgattcgggactatttgactttgtcaactttgtaaaggatatgatatgttgtgattctagaatagtagtagctctatctagtctagtatctaaacattgggaattgacaaataaaaagtataggtgtatggcattagccgaacatatatctgatagtattccaatatctgagctatctagactacgatacaatctatgtaagtatctacgcggacacactgagagcatagaggataaatttgattattttgaagacgatgattcgtctacatgttctgccgtaaccgacagggaaacggatgtataattttttttatagcgtgaaggatatgataaaaaatataattgttgtatttatcccattccaatcaccttatatgattctgtaacacaatgaaggagtctcatagatgtatagaggtcagatactggtttgataaactgtttattccacatgagtatgtttgactttatggttagacccgcatactttaacaaatcactgaaaattggagttaggtattgacctctcagaatcagttgccgttctggaacattaaatgtattttttatgatatactccaacgcatttatgtgggcatacaacaagtcattactaatggagtattccaagagttttagttgtctagtatttaacaagagaagagatttcaacagactgtttatgaactcgaatgccgcctcattgtcgcttatattgatgatgtcgaattctcccaatatcatcaccgatgagtagctcatcttgttatcgggatccaagttttctaaagatgtcattaaaccctcgatcatgaatggatttatcatcatcgtttttatgttggacatgagcttagtccgtttgtccacatctatagacgacgatttctgaattattttatatatccctctctttaactccaggaacttgtcaggatggtctactttaatatgttctcgtctaagagatgaaaatctttggatggttgcacgcgacttttctctaaaggatgacgttgcccaagatcctctcttaaatgaatccatcttatccttggacaagatggacagtctattttccttagatggtttaatatttttgttacccatgatctataaaggtagacctaatcgtctcggatgacctatatatttattttcagttttattatacgcataaattgtaaaaaatatgttaggtttacaaaaatgtctcgtggggcattaatcgtttttgaaggattggacaaatctggaaaaacaacacaatgtatgaacatcatggaatctataccggcaaacacgataaaatatcttaactttcctcagagatccactgtcactggaaagatgatagatgactatctaactcgtaaaaaaacctataatgatcatatagttaatctattattttgtgcaaatagatgggagtttgcatcttttatacaagaacaactagaacagggaattactttaatagttgatagatacgcgttctctggagtagcgtatgccgccgctaaaggcgcgtcaatgactctcagtaagagttatgaatctggattgcctaaacccgacttagttatattcttggaatctggtagcaaagaaattaatagaaacgtcggcgaggaaatttatgaagatgttacattccaacaaaaggtattacaagaatataaaaaaatgattgaagaaggagatattcattggcaaattatttcttctgaattcgaggaagatgtaaagaaggagttgattaagaatatagttatagaggctatacacacggttactggaccagtggggcaactgtggatgtaatagtgaaattacattttttataaatagatgttagtacagtgttataaatggatgaagcatattactctggcaacttggaatcagtactcggatacgtgtccgatatgcataccgaactcgcatcaatatctcaattagttattgccaagatagaaactatagataatgatatattaaacaaggacattgtaaattttatcatgtgtagatcaaacttggataatccatttatctctttcctagatactgtatatactattatagatcaagagaactatcagaccgaattgattaattcattagacgacaatgaaattatcgattgtatagttaataagtttatgagcttttataaggataacctagaaaatatagtagatgctatcattactctaaaatatataatgaataatccagattttaaaactacgtatgccgaagtactcggttccagaatagccgatatagatattaaacaagtgatacgtgagaatatactacaattgtctaatgatatccgcgaacgatatttgtgaaaaatattaaaaaaaaatactttttttattaaatgacgtcgcttcgcgaatttagaaaattatgctgtgatatatatcacgcatcaggatataaagaaaaatctaaattaattagagactttataacagatagggatgataaatatttgatcattaagctattgcttcccggattagacgatagaatttataacatgaacgataaacaaattataaaattatatagtataatatttaaacaatctcaggaagatatgctacaagatttaggatacggatatataggagacactattaggactttcttcaaagagaacacagaaatccgtccacgagataaaagcattttaactttagaagacgtggatagtttcttaactacgttatcatccgtaactaaagaatcgcatcaaataaaattattgactgatatcgcatccgtttgtacatgtaatgatttaaaatgtgtagtcatgcttattgataaagatctaaaaattaaagcgggtcctcggtacgtacttaacgctattagtcctaatgcctatgatgtgtttagaaaatctaataacttgaaagagataatagaaaatgcatctaaacaaaatctagactctatatctatttctgttatgactccaattaatcccatgttagcggaatcgtgtgattctgtcaataaggcgtttaaaaaatttccatcaggaatgtttgcggaagtcaaatacgatggtgaaagagtacaagttcataaaaataataacgagtttgccttctttagtagaaacatgaaaccagtactctctcataaagtggattatctcaaagaatacataccgaaagcatttaaaaaagctacgtctatcgtattggattctgaaattgttcttgtagacgaacataatgtaccgctcccgtttggaagtttaggaatacacaaaaagaaagaatataaaaactctaacatgtgtttgttcgtgtttgactgtttgtactttgatggattcgatatgacggacattccattgtacgaacgaagatcttttctcaaagatgttatggttgaaatacccaatagaatagtattctcagagttgacgaatattagtaacgagtctcagttaactgacgtattggatgatgcactaacgagaaaattagaaggattggtcttaaaagatattaatggagtatacgaaccgggaaagagaagatggttaaaaataaagcgagactatttgaacgagggttccatggcagattctgccgatttagtagtactaggtgcttactatggtaaaggagcaaagggtggtatcatggcagtctttctaatgggttgttacgacgatgaatccggtaaatggaagacggttaccaagtgttcaggacacgatgataatacgttaagggttttgcaagaccaattaacgatggttaaaattaacaaggatcccaaaaaaattccagagtggttggtagttaataaaatctatattcccgattttgtagtagaggatccgaaacaatctcagatatgggaaatttcaggagcagagtttacatcttccaagtcccataccgcaaatggaatatccattagatttcctagatttactaggattagagaagataaaacgtggaaagaatctactcatctaaacgatttagtaaacttgactaaatcttaatagttacatacaaactgaaaattaaaataacactatttagttggtggtcgccatggatggtgttattgtatactgtctaaacgcgttagtaaaacatggcgaggaaataaatcatataaaaaatgatttcatgattaaaccatgttgtgaaagagtttgtgaaaaagtcaagaacgttcacattggcggacaatctaaaaacaatacagtgattgcagatttgccatatatggataatgcggtatccgatgtatgcaattcactgtataaaaagaatgtatcaagaatatccagatttgctaatttgataaagatagatgacgatgacaagactcctactggtgtatataattattttaaacctaaagatgttattcctgttatcatatctataggaaaggataaagatgtctgtgaactattaatctcatcagacatatcgtgtgcatgcgtggagttaaattcatatcacgtagccattcttcccatggatgtttccttttttaccaaaggaaatgcatcattgattattctcctgtttgatttctctatcgatgcagcacctctcttaagaagtgtaaccgataataatgttattatatctagacaccagcgtctacatgacgagcttccgagttccaattggttcaagttttacataagtataaagtccgactattgttctatattatatatggttgttgatggatctgtgatgcatgcgatagctgataatagaactcacgcaattattagcaaaaatatattagacaatactacgattaacgatgagtgtagatgctgttattttgaaccacagattaggattcttgatagagatgagatgctcaatggatcatcgtgtgatatgaacagacattgtattatgatgaatttacctgatgtaggcaaatttggatctagtatgttggggaaatatgaacctgacatgattaagattgctctttcggtggctggtaatttaataagaaatcgagactacattcccgggagacgaggatatagctactacgtttacggtatagcctctagataatttttttaagcacgaaataaaaaacataattttaaaccaatctatttcatactattttgtgtgatcaccatggacataaagatagatattagtatttctggtgataaatttacggtgactactaggagggaaaatgaagaaagaaaaaaatatctacctctccaaaaagaaaaaactactgatgttatcaaacctgattatcttgagtacgatgacttgttagatagagatgagatgtttactattctagaggaatattttatgtacagaggtctattaggcctcagaataaaatatggacgactctttaacgaaattaaaaaattcgacaatgatgcggaagaacaattcggtactatagaagaactcaagcagaaacttagattaaattctgaagagggagcagataactttatagattatataaaggtacaaaaacaggatatcgtcaaacttactgtatacgattgcatatctatgataggattgtgtgcatgcgtggtagatgtttggagaaatgagaaactgttttctagatggaaatattgtttacgagctattaaactgtttattaatgatcacatgcttgataagataaaatctatactgcagaatagactagtatatgtggaaatgtcatagaaagttaaaagttaatgagagcaaaaatatataaggttgtattccatatttgttattttttctgtaatagttagaaaaatacattcgatggtctatctaccagattattatgtgttataaggtactttttctcataataaactagagtatgagtaagatagtgtttttcaaaacatataaatctaaaattgatggatgagatatacagctattaatttcgaaaatatattttaatctgataactttaaacatggatttttgatggtggtttaacgttttaaaaaaagattttgttattgtagtatatgataatattaaaagatggatataaagaatttgctgactgcatgtactattttttacattactacattggctacggcagatatacctactccgccaccaacgggtcatgtgacaagggagaatatcttgataagaggcataatcaatgttgtaatcggtgtccacctggagaatttgccaaggttagatgtaatggtaacgataacacaaaatgtgaacgctgcccacctcatacatataccacaatcccaattattctaatggatgtcatcaatgtagaaaatgcccaaccggatcatttgataaggtaaagtgtaccggaacacagaacagtaaatgttcgtgtcttcctggttggtattgtgctactgattcttcacagactgaagattgttgaaattgtgtaccaaaaaggagatgtccatgcggatactttggtggaatagatgaacaaggaaatcctatttgtaaatcgtgttgtgttggtgaatattgcgactacctacgtaattatagacttgatccatttcctccatgcaaactatctaaatgtaattaattatgattttgatgataatgttaccatacattatatcgctacttggttagtgtattattcagtatgaagacctattaataattacttatcttttgacgatcttgttataattataatataaaaatacttatggcatagtaactcataattgctgacgcgataaattcgtaataatctgttttgttcaaatttttataaggaatctacaggcataaaaataaaaatataatttataatatactcttacagcgcgccatcatgaataacagcagtgaattgattgctgttattaatggatttagaaatagtggacgattttgtgatattagtatagttattaatgatgaaaggataaacgctcataaactcatcctatctggagcctccgaatatttttccattctgttttccaataattttatcgattctaatgaatacgaagttaatctaagtcatttagattatcaaagcgttaacgatttgatcgattacatttatgggatacctttgagcctaactaacgataacgtgaaatatattctttcaaccgctgattttttacaaattggatctgctattacggagtgtgaaaattacatacttaaaaatctttgttctaaaaactgtatcgatttctacatatacgctgataaatataataacaagaaaatagaatcagcgtcgtttaacacaatattacaaaatattttgagactcatcaacgatgaaaactttaaatacttaacagaggaatcaatgataaaaattttaagcgatgatatgttaaatataaaaaatgaggattttgcaccactaattctcattaaatggttagagagtactcaacaatcatgcaccgtcgagttacttagatgcctcagaatatcattgctttccccacaagttataaaatcactttatagtcatcaactggttagttcaatctacgaatgtataacattcttaaacaatatagcattcttggatgaatcatttcctagataccatagcatcgagttgatatctatcggtataagtaattcgcatgataagatttccataaactgctacaatcataaaaaaaatacatgggaaatgatatcttcacgtagatataggtgtagtttcgcagtggccgtcctggataatattatctatatgatgggtggatatgatcagtccccgtatagaagttcaaaggttatagcgtacaatacatgtacaaattcttggatatatgatataccagagctaaaatatcctcgttctaattgtgggggactggctgatgacgaatacatttattgtataggcggcatacgcgatcaggattcatcgttgacatctagtattgataaatggaagccatcaaaaccatattggcagaagtatgctaaaatgcgcgaaccaaaatgtgatatgggggttgcgatgttaaacggattaatatatgtcatgggtggaatcgttaaaggtgacacgtgtaccgacgcactagagagtttatcagaagatggatggatgaagcatcaacgtcttccaataaaaatgtccaatatgtcgacgattgttcatgatggcaagatttatatatctggaggttacaacaatagtagtgtagttaatgtaatatcgaatctagtccttagctataatccgatatatgatgaatggaccaaattatcatcattaaacattcctagaattaatcccgctctatggtcagcgcataataaattatatgtaggaggaggaatatctgatgatgttcgaactaatacatctgaaacatacgataaagaaaaagattgttggacattggataatggtcacgtgttaccacgcaattatataatgtataaatgcgaaccgattaaacataaatatccattggaaaaaacacagtacacgaatgattttctaaagtatttggaaagttttataggtagttgatagaacaaaatacataattttgtaaaaataaatcactttttatactaatatgacacgattaccaatacttttgttactaatatcattagtatacgctacaccttttcctcagacatctaaaaaaataggtgatgatgcaactctatcatgtaatcgaaataatacaaatgactacgttgttatgagtgcttggtataaggagcccaattccattattcttttagctgctaaaagcgacgtcttgtattttgataattataccaaggataaaatatcttacgactctccatacgatgatctagttacaactatcacaattaaatcattgactgctagagatgccggtacttatgtatgtgcattctttatgacatcaactacaaatgacactgataaagtagattatgaagaatactccacagagttgattgtaaatacagatagtgaatcgactatagacataatactatctggatctacacattcaccggaaactagttctaagaaacctgattatatagataattctaattgctcgtcggtattcgaaatcgcgactccggaaccaattactgataatgtagaagatcatacagacaccgtcacatacactagtgatagcattaatacagtaagtgcatcatctggagaatccacaacagacgagactccggaaccaattactgataaagaagatcatacagttacagacactgtctcatacactacagtaagtacatcatctggaattgtcactactaaatcaaccaccgatgatgcggatctttatgatacgtacaatgataatgatacagtaccaccaactactgtaggcggtagtacaacctctattagcaattataaaaccaaggactttgtagaaatatttggtattaccgcattaattatattgtcggccgtggcaattttctgtattacatattatatatataataaacgttcacgtaaatacaaaacagagaacaaagtctagatttttgacttacataaatgtctgggatagtaaaatctatcatattgagcggaccatctggtttaggaaagacagccatagccaaaagactatgggaatatatttggatttgtggtgtcccataccactagatttcctcgtcctatggaacgagaaggtgttgattaccattacgttaacagagaggccatctggaagggaatagccgccggaaactttctagaacatactgagtttttaggaaatatttacggaacttctaaaacagctgtgaatacagcggctattaataatcgtatttgtgtgatggatctaaacatcgacggtgttagaagtcttaaaaatacgtacctaatgccttactcggtgtatataagacctacctctcttaaaatggttgagaccaagcttcgttgtagaaacactgaagctaacgatgagattcatcgtcgcgtgatattggcaaaaacggatatggatgaggccaacgaagcaggtctattcgacactattatcattgaagatgatgtgaatttagcatatagtaagttaattcagatactacaggaccgtattagaatgtattttaacactaattagagacttaagacttaaaacttgataattaataatataactcgtttttatatgtggctatttcaacgtctaatgtattagttaaatattaaaacttaccacgtaaaacttaaaatttaaaatgatatttcattgacagatagatcacacattatgaactttcaaggacttgtgttaactgacaattgcaaaaatcaatgggtcgttggaccattaataggaaaaggtggattcggtagtatttatactactaatgacaataattatgtagtaaaaatagagcccaaagctaacggatcattatttaccgaacaggcattttatactagagtacttaaaccatccgttatcgaagaatggaaaaaatctcacaatataaagcacgtaggtcttatcacgtgcaaggcatttggtctatacaaatccattaatgtggaatatcgattcttggtaattaatagattaggtgcagatctagatgcggtgatcagagccaataataatagattaccaaaaaggtcggtgatgttgatcggaatcgaaatcttaaataccatacaatttatgcacgagcaaggatattctcacggagatattaaagcgagtaatatagtcttggatcaaatagataagaataaattatatctagtggattacggattggtttctaaattcatgtctaatggagaacatgttccatttataagaaatccaaataaaatggataacggtactctagaatttacacctatagattcgcataaaggatacgttgtatctagacgtggagatctagaaacacttggatattgtatgattagatggttgggaggtatcttgccatggactaagatatctgaaacaaagaattgtgcattagtaagtgccacaaaacagaaatatgttaacaatactgcgactttgttaatgaccagtttgcaatatgcacctagagaattgctgcaatatattaccatggtaaactctttgacatattttgaggaacccaattatgacgagtttcggcacatattaatgcagggtgtatattattaagtgtggtgtttggtcgatgtaaaatttttgtcgataaaaattaaaaaataacttaatttattattgatctcgtgtgtacaaccgaaatcatggcgatgttttacgcacacgctctcggtgggtacgacgagaatcttcatgcctttcctggaatatcatcgactgttgccaatgatgtcaggaaatattctgttgtgtcagtttataataacaagtatgacattgtaaaagacaaatatatgtggtgttacagtcaggtgaacaagagatatattggagcactgctgcctatgtttgagtgcaatgaatatctacaaattggagatccgatccatgatcaagaaggaaatcaaatctctatcatcacatatcgccacaaaaactactatgctctaagcggaatcgggtacgagagtctagacttgtgtttggaaggagtagggattcatcatcacgtacttgaaacaggaaacgctgtatatggaaaagttcaacatgattattctactatcaaagagaaggccaaagaaatgaatgcacttagtccaggacctatcattgattaccacgtctggataggagattgtatctgtcaagttactgctgtggacgtacatggaaaggaaattatgagaatgagattcaaaaagggtgcggtgcttccgatcccaaatctggtaaaagttaaacttggggagaatgatacagaaaatctttcttctactatatcggcggcaccatcgaggtaaccacctctctggaagacagcgtgaataatgtactcatgaaacgtttggaaactatacgccatatgtggtctgtcgtatatgatcattttgatattgtgaatggtaaagaatgctgttatgtgcatacgcatttgtctaatcaaaatcttataccgagtactgtaaaaacaaatttgtacatgaagactatgggatcatgcattcaaatggattccatggaagctctagagtatcttagcgaactgaaggaatcaggtggatggagtcccagaccagaaatgcaggaatttgaatatccagatggagtggaagacactgaatcaattgagagattggtagaggagttcttcaatagatcagaacttcaggctggtgaatcagtcaaatttggtaattctattaatgttaaacatacatctgtttcagctaagcaactaagaacacgtatacggcagcagcttcctttatactctcatcttttaccaacacaaagggtggatatttgttcattggagttgataataatacacacaaagtaattggattcacggtgggtcatgactacctcagactggtagagaatgatatagaaaagcatatcaaaagacttcgtgttgtgcatttctgtgagaagaaagaggacatcaagtacacgtgtcgattcatcaaggtatataaacctggggatgaggctacctcgacatacgtgtgcgctatcaaagtggaaagatgctgttgtgctgtgtttgcagattggccagaatcatggtatatggatactaatggtatcaagaagtattctccagatgaatgggtgtcacatataaaattttaattaatgtaatagagaacaaataataaggttgtaatatcatatagacaataactaacaattaattagtaactgttatctcttttttaactaaccaactaactatatacctattaatacatcgtaattatagttcttaacatctattaatcattaattcgcttctttaattttttataaactaacattgttaattgaaaagggataacatgttacagaatataaattatatatggatttttttaaaaaggaaatacttgactggagtatatatttatctcttcattatatagcacgcgtgttttccaatttttccacatcccatataatacaggattataatctcgttcgaacatacgagaaagtggataaaacaatagttgattttttatctaggttgccaaatttattccatattttagaatatggggaaaatattctacatatttattctatggatgatgctaatacgaatattataattttttttctagatagagtattaaatattaataagaacgggtcatttatacacaatctcaggttatcatcatccattaatataaaagaatatgtatatcaattagttaataatgatcatccagataataggataagactaatgcttgaaaatggacgtagaacaagacattttttgtcctatatatcagatacagttaatatctatatatgtattttaataaatcatggattttatatagatgccgaagacagttacggttgtacattattacatagatgtatatatcactataagaaatcagaatcagaatcatacaatgaattaattaagatattgttaaataatggatcagatgtagataaaaaagatacgtacggaaacacaccttttatcctattatgtaaacacgatatcaacaacgtggaattgtttgagatatgtttagagaatgctaatatagactctgtagactttaatagatatacacctcttcattatgtctcatgtcgtaataaatatgattttgtaaagttattaatttctaaaggagcaaatgttaatgcgcgtaatagattcggaactactccattttattgtggaattatacacggtatctcgcttataaaactatatttggaatcagacacagagttagaaatagataatgaacatatagttcgtcatttaataatttttgatgctgttgaatctttagattatctattatccagaggagttattgatattaactatcgtactatatacaacgaaacatctatttacgacgctgtcagttataatgcgtataatacgttggtctatctattaaacagaaatggtgattttgagacgattactactagtggatgtacatgtatttcggaagcagtcgcaaacaacaacaaaataataatggaagtactattgtctaaacgaccatctttgaaaattatgatacagtctatgatagcaattactaaacataaacagcataatgcagatttattgaaaatgtgtataaaatatactgcgtgtatgaccgattatgatactcttatagatgtacagtcgctacagcaatataaatggtatattttaaaatgtttcgatgaaatagatatcatgaagagatgttatataaaaaataaaactgtattccaattagttttttgtatcaaagacattaatactttaatgagatacggtaaacatccttctttcgtgaaatgcactagtctcgacgtatacggaagtcgtgtacgtaatatcatagcatctattagatatcgtcagagattaattagtctattatccaagaagctggatcctggagataaatggtcgtgttttcctaacgaaataaaatataaaatattggaaaactttaacgataacgaactatccacatatctaaaaatcttataaacactattaaaatataaaatctaagtaggataaaatcacactacatcattgtttccttttagtgctcgacagtgtatactatttttaacactcataaataaaaatgaaaacgatttccgttgttacgttgttatgcgtactacctgctgttgtttattcaacatgtactgtacccactatgaataacgctaaattaacgtctaccgaaacatcgtttaatgataaacagaaagttacgtttacatgtgatcagggatatcattcttcggatccaaatgctgtctgcgaaacagataaatggaaatacgaaaatccatgcaaaaaaatgtgcacagtttctgattacatctctgaattatataataaaccgctatacgaagtgaattccaccatgacactaagttgcaacggcgaaacaaaatattttcgttgcgaagaaaaaaatggaaatacttcttggaatgatactgttacgtgtcctaatgcggaatgtcaacctcttcaattagaacacggatcgtgtcaaccagttaaagaaaaatactcatttggggaatatatgactatcaactgtgatgttggatatgaggttattggtgcttcgtacataagttgtacagctaattcttggaatgttattccatcatgtcaacaaaaatgtgatatgccgtctctatctaatggattaatttccggatctacattttctatcggtggcgttatacatcttagttgtaaaagtggttttacactaacggggtctccatcatccacatgtatcgacggtaaatggaatcccgtactcccaatatgtgtacgaactaacgaagaatttgatccagtggatgatggtcccgacgatgagacagatttgagcaaactctcgaaagacgttgtacaatatgaacaagaaatagaatcgttagaagcaacttatcatataatcatagtggcgttaacaattatgggcgtcatatttttaatctccgttatagtattagtttgttcctgtgacaaaaataatgaccaatataagttccataaattgctaccgtaaatataaatccgttaaaataatgaataattaataacgaacaagtatcaaaagattaaagaattatagctagaatcaattgagatgtcttcttcagtggatgttgatatctacgatgccgttagagcatttttactcaggcactattataacaagagatttattgtgtatggaagaagtaacgccatattacataatatatacaggctatttacaagatgcgccgttataccgttcgatgatatagtacgtactatgccaaatgaatcacgtgttaaacaatgggtgatggatacacttaatggtataatgatgaatgaacgcgatgtttctgtaagcgttggcaccggaatactattcatggaaatgtttttcgattacaataaaaatagtatcaacaatcaactaatgtatgatataattaatagcgtatctataattctagctaatgagagatatagaagcgcttttaacgacgatggtatatacatccgtagaaatatgattaacaagttgtacggatacgcatctctaactactattggcacgatcgctggaggtgtttgttattatctgttgatgcatctagttagtttgtataaataattatttcaatatactagttaaaattttaagattttaaatgtataaaaaactaataacgtttttatttgtaataggtgcattagcatcctattcgaataatgagtacactccgtttaataaactgagtgtaaaactctatatagatggagtagataatatagaaaattcatatactgatgataataatgaattggtgttaaattttaaagagtacacaatttctattattacagagtcatgcgacgtcggatttgattccatagatatagatgttataaacgactataaaattattgatatgtataccattgactcgtctactattcaacgcagaggtcacacgtgtagaatatctaccaaattatcatgccattatgataagtacccttatattcacaaatatgatggtgatgagcgacaatattctattactgcagagggaaaatgctataaaggaataaaatatgaaataagtatgatcaacgatgatactctattgagaaaacatactcttaaaattggatctacttatatatttgatcgtcatggacatagtaatacatattattcaaaatatgatttttaaaaatttaaaatatattatcacttcagtgacagtagtcaaataacaaacaacaccatgagatatattataattctcgcagttttgttcattaatagtatacacgctaaaataactagttataagtttgaatccgtcaattttgattccaaaattgaatggactggggatggtctatacaatatatcccttaaaaattatggcatcaagacgtggcaaacaatgtatacaaatgtaccagaaggaacatacgacatatccgcatttccaaagaatgatttcgtatctttctgggttaaatttgaacaaggcgattataaagtggaagagtattgtacgggactatgcgtcgaagtaaaaattggaccaccgactgtaacattgactgaatacgacgaccatatcaatttgtacatcgagcatccgtatgctactagaggtagcaaaaagattcctatttacaaacgcggtgacatgtgtgatatctacttgttgtatacggctaacttcacattcggagattctaaagaaccagtaccatatgatatcgatgactacgattgcacgtctacaggttgcagcatagactttgtcacaacagaaaaagtgtgcgtgacagcacagggagccacagaagggtttctcgaaaaaattactccatggagttcgaaagtatgtctgacacctaaaaagagtgtatatacatgcgcaattagatccaaagaagatgttcccaatttcaaggacaaaatggccagagttatcaagagaaaatttaataaacagtctcaatcttatttaactaaatttctcggtagcacatcaaatgatgttaccacttttcttagcatgcttaacttgactaaatattcataactaatttttattaatgatacaaaaacgaaataaaactgcatattatacactggttaacgcccttataggctctaaccattttcaagatgaggtccctgattatagtccttctgttcccctctatcatctactccatgtctattagacaatgtgagaagactgaagaggaaacatggggattgaaaatagggttgtgtataattgccaaagatttctatcccgaaagaactgattgcagtgttcatctcccaactgcaagtgaaggattgataactgaaggcaatggattcagggatatacgaaacaccgataaattataaaaaaagcaatgtgtccgctgtttccgttaataatactattttcgtaactggcggattattcataaataactctaatagcacgatcgtggttaacaatatggaaaaacttgacatttataaagacaaacaatggtcgattatagaaatgcctatggctagggtatatcacggcatcgactcgacatttggaatgttatattttgccggaggtctatccgttaccgaacaatatggtaatttagagaaaaacaacgagatatcttgttacaatcctagaacgaataagtggtttgatatttcatatactatttataagatatccatatcatcattgtgtaaactaaataacgtcttctatgtatttagtaaggacattggatatgtggaaaagtatgatggtgcatggaagttagtacatgatcgtctccccgctataaaggcattatcaacttctccttattgattgaaaatgaaaatataaatagtttttatgtatagcagtattaccctatagttttattgcttactactaacatggatacagatgttacaaatgtagaagatatcataaatgaaatagatagagagaaagaagaaatactaaaaaatgtagaaattgaaaataataaaaacattaacaagaatcatccaagtggatatattagagaagcactcgttattaataccagtagtaatagtgattccattgataaagaagttatagaatgtatctgtcacgatgtaggaatatagatcatatctactaatttttataatcgatacaaaacataaaaaacaactcgttattacatagcaggcatggaatccttcaagtattgttttgataacgatggcaagaaatggattatcggaaatactttatattctggtaattcaatactatataaggtcagaaaaaatttcactagttcgttctacaattacgtaatgaagatagatcacaaatcacacaagccattgttgtctgaaatacgattctatatatctgtattggatcctttgactatcgacaactggacacgggaacgtggtataaagtatttggctattccagatctgtatggaattggagaaaccgatgattatatgttcttcgttataaagaatttgggaagagtattcgccccaaaggatactgaatcagtcttcgaagcatgcgtcactatgataaacacgttagagtttatacactctcaaggatttacccatggaaaaatagaaccgaggaatatactgattagaaataaacgtctttcactaattgactattctagaactaacaaactatacaagagtggaaactcacatatagattacaacgaggacatgataacttcaggaaatatcaattatatgtgtgtagacaatcatcttggagcaacagtttcaagacgaggagatttagaaatgttgggatattgcatgatagaatggttcggtggcaaacttccatggaaaaacgaaagtagtataaaagtaataaaacaaaaaaaagaatataaaaaatttatagctactttctttgaggactgttttcctgaaggaaatgaacctctggaattagttagatatatagaattagtatacacgttagattattctcaaactcctaattatgacagactacgtaaactgtttatacaagattgaaattatattcttttttttatagagtgtggtagtgttacggatatttaatattagactatctctatcgcgctacacgaccaatatcgattactatggatatcttcagggaaatcgcatcttctatgaaaggagagaatgtattcatttctccagcgtcaatctcgtcagtattgacaatactgtattatggagctaatggatccactgctgaacagctatcaaaatatgtagaaaaggaggagaacatggataaggttagcgctcaaaatatctcattcaaatccataaataaagtatatgggcgatattctgccgtgtttaaagattcctttttgagaaaaattggcgataagtttcaaactgttgacttcactgattgtcgcactatagatgcaatcaacaagtgtgtagatatctttactgaggggaaaatcaatccactattggatgaaccattgtctcctgatacctgtctcctagcaattagtgccgtatactttaaagcaaaatggttgacgccattcgaaaaggaatttaccagtgattatcccttttacgtatctccgacggaaatggtagatgtaagtatgatgtctatgtacggcaaggcatttaatcacgcatctgtaaaggaatcattcggcaacttttcaatcatagaactgccatatgttggagatactagtatgatggtcattcttccagacaagattgatggattagaatccatagaacaaaatctaacagatacaaattttaagaaatggtgtaactctctggaagctacgtttatcgatgttcacattcccaagtttaaggtaacaggctcgtataatctggtggatactctagtaaagtcaggactgacagaggtgttcggttcaactggagattatagcaatatgtgtaattcagatgtgagtgtcgacgctatgatccacaaaacgtatatagatgtcaatgaagagtatacagaagcagctgcagcaacttgtgcactggtgtcagactgtgcatcaacaattacaaatgagttctgtgtagatcatccgttcatctatgtgattaggcatgttgatggaaaaattcttttcgttggtagatattgctctccgacaactaattgttaaccattttttttaaaaaatagaaaaaacatgtggtattagtgcaggtcgttattcttccaattgcaattggtaagatgacggccaactttagtacccacgtcttttcaccacagcactgtggatgtgacagactgaccagtattgatgacgtcagacaatgtttgactgaatatatttattggtcgtcctatgcataccgcaacaggcaatgcgctggacaattgtattccacactcctctcttttagagatgatgcggaattagtgttcatcgacattcgcgagctggtaaaaaatatgccgtgggatgatgtcaaagattgtgcagaaatcatccgttgttatataccggatgagcaaaaaaccatcagagagatttcggccatcatcggactttgtgcatatgctgctacttactggggaggtgaagaccatcccactagtaacagtctgaacgcattgtttgtgatgcttgagatgctcaattacgtggattataacatcatattccggcgtatgaattgatgagttgtacatcttgacattttcttctttcttctcttctccctttcccagaaacaaactttttttacccactataaaataaaatgagtatactacctgttatatttctttctatatttttttattcttcattcgttcagacttttaacgcgcctgaatgtatcgacaaagggcaatattttgcatcattcatggagttagaaaacgagccagtaatcttaccatgtcctcaaataaatacgctatcatccggatataatatattagatattttatgggaaaaacgaggagcggataatgatagaattataccgatagataatggtagcaatatgctaattctgaacccgacacaatcagactctggtatttatatatgcattaccacgaacgaaacctactgtgacatgatgtcgttaaatttgacaatcgtgtctgtctcagaatcaaatatagatcttatctcgtatccacaaatagtaaatgagagatctactggcgaaatggtatgtcccaatattaatgcatttattgctagtaacgtaaacgcagatattatatggagcgggcatcgacgccttagaaataagagacttaaacaacggacacctggaattattaccatagaagatgttagaaaaaatgatgctggttattatacatgtgttttagaatatatatacggtggcaaaacatataacgtaaccagaattgtaaaattagaggtacgggataaaataataccttctactatgcaattaccagatggcattgtaacttcaataggtagtaatttgactattgcatgcagagtatcgttgagacctcccacaacggatgcagacgtcttttggataagtaatggtatgtattacgaagaagatgatggggacggaaacggtagaataagtgtagcaaataaaatctatatgaccgataagagacgtgttattacatcccggttaaacattaatcctgtcaaggaagaagatgctacaacgtttacgtgtatggcgtttactattcctagcatcagtaaaacagttactgttagtataacgtgaatgtatgttgttacatttccatgtcaattgagtttataagaatttttatacattatcttccaacaagcaattgacgaacgtattgctatgattaactcccacgatactatgcatattattaatcattaacttgcagactatacctagagctattttgacatactcgtgttcttgtgtaattgcagtatctatattattaaagtacgtaaatctagctatagttttattatttaattttagataatataccgtctccttatttttaaaaattgccacatcctttattaaatcatgaatgggaatttctatgtcatagttaatatattgtgaacaacaagagcagatatctataggaaagggtggaatgcgatacattgatctatgtagttttaaaacacacgcaaactttgaagaatttatataaatcattccatcgatacatccttctatgttgagatgtatatatccaggaattcgtttattaatatcgggaaatgtataaactaaaacattgcccggaagcggagcttctaccggagttatatcagtttttaacttacaaaatgtaaccaatacctttgcatgacttgttttgttcggcaacgttagtttaaacttgacgaatggattaattacaatagcatgatccgcgcatctattaagtttttttactttaacgcccttgtatgtttttacagagactttatctaaatttctagtgcttgtatgtgttataaatataacgggatatagaactgaatcacctaccttagatacccaattacattttatcagatccagataataaacaaattttgtcgccctaactaattctatattgttatatattttacaattggttatgatatcatgtaataacttggaatctaacgcacatcgtcgtacgtttatacaattgtgatttagtgtagtatatctacacatgtatttttccgcgctatagtattctggactagtgataaaactatcgttatatctgtcttcaatgaactcatcgagatattgctctctgtcatattcatacacctgcataaactttctagacatcttacaatccgtgttattttaggatcatatttacatatttacgggtatatcaaagatgttagattagttaatgggaatcgtctataataatgaatattaaacaattatatgaggacttttaccacaaagcatcataaaaatgagtcgtcgtctgatttatgttttaaatatcaaccgcgaatcaactcataaaatacaagagaatgaaatatatacatattttagtcattgcaatatagaccatacttctacagaacttgattttgtagttaaaaactatgatctaaacagacgacaacctgtaactgggtatactgcactacactgctatttgtataataattactttacaaacgatgtactgaagatattattaaatcatggagtggatgtaacgatgaaaaccagtagcggacgtatgcctgtttatatattgcttactagatgttgcaatatttcacatgatgtagtgatagatatgatagacaaagataaaaaccacttattacatagagactattccaacctattactagagtatataaaatctcgttacatgttattaaaggaagaggatatcgatgagaacatagtatccactttattagataagggaatcgatcctaactttaaacaagacggatatacagcgttacattattattatttgtgtctcgcacacgtttataaaccaggtgagtgtagaaaaccgataacgataaaaaaggccaagcgaattatttctttgtttatacaacatggagctaatctaaacgcgttagataattgtggtaatacaccattccatttgtatcttagtattgaaatgtgtaataatattcatatgactaaaatgctgttgacttttaatccgaatttcgaaatatgtaataatcatggattaacgcctatactatgttatataacttccgactacatacaacacgatattcttgttatgttaatacatcactatgaaacaaatgttggagaaatgccgatagatgagcgtcgtataatcgtattcgagtttatcaaaacatattctacacgtcctgcagattcgataacttatttgatgaataggtttaaaaatatagatatttatacccgctatgaaggaaagacattattacacgtagcatgtgaatataataatacacacgtaatagattatcttatacgtatcaacggagatataaatgcgttaaccgacaataacaaacacgctacacaactcattatagataacaaagaaaattccccatataccattaattgtttactgtatatacttagatatattgtagataagaatgtgataagatcgttggtggatcaacttccatctctacctatcttcgatataaaatcatttgagaaattcatatcctactgtatacttttagatgacacattttacaatagacacgttaggaatcgcgattctaaaacgtatcgatacgcattttcaaaatacatgtcgtttgataaatacgatggtataataactaaatgtcataaagaaacaatattgctcaaactatccactgttctagacactacactatatgcagttttaagatgccataattcgaaaaagttaagaagatacctcaccgagttaaaaaaatataataacgataagtcctttaaaatatattctaatattatgaatgagagataccttaatgtatattataaagatatgtacgtgtcaaaggtatatgataaactatttcctgttttcacagataaaaattgtctactaacattactaccttcagaaattatatacgaaatattatacatgctgacaattaacgatctttataatatatcgtatccacctaccaaagtatagttgtatttttctcatgcgatgtgtgtaaaaaaactgatattatataaatattttagtgccgtataataaagatgacgatgaaaatgatggtacatatatatttcgtatcattattgttattgctattccacagttacgccatagacatcgaaaatgaaatcacagaattcttcaataaaatgagagatactctaccagctaaagactctaaatggttgaatccagcatgtatgttcggaggcacaatgaatgatatagccgctctaggagagccattcagcgcaaagtgtcctcctattgaagacagtcttttatcgcacagatataaagactatgtggttaaatgggaaaggctagaaaaaaatagacggcgacaggtttctaataaacgtgttaaacatggtgatttatggatagccaactatacatctaaattcagtaaccgtaggtatttgtgcaccgtaactacaaagaatggtgactgtgttcagggtatagttagatctcatattagaaaacctccttcatgcattccaaaaacatatgaactaggtactcatgataagtatggcatagacttatactgtggaattctttacgcaaaacattataataatataacttggtataaagataataaggaaattaatatcgacgacattaagtattcacaaacgggaaaggaattaattattcataatccagagttagaagatagcggaagatacgactgttacgttcattacgacgacgttagaatcaagaatgatatcgtagtatcaagatgtaaaatacttacggttataccgtcacaagaccacaggtttaaactaatactagatccaaaaatcaacgtaacgataggagaacctgccaatataacatgcactgctgtgtcaacgtcattattgattgacgatgtactgattgaatgggaaaatccatccggatggcttataggattcgattttgatgtatactctgttttaactagtagaggcggtattaccgaggcgaccttgtactttgaaaatgttactgaagaatatataggtaatacatataaatgtcgtggacacaactattattttgaaaaaacccttacaactacagtagtattggagtaaatatacaatgcatttttatatacattactgaataattattattattatttatatcgtatttgtgctataacgcgactatctaggtatttgtatctcaccgatagagaacatataaatgtagactctattaaacagttgtgtaaaatatcagatcctaatgcatgttatagatgtggatgtacggctttacatgagtacttttataattatagatcagtcaacggaaaatacaagtatagatacaacggttactatcaatattatttatctagcgattatgaaaattataatgaatattattatgatgattatgatagaactggtatgaacagtgagagtgataatatatcaatcaaaacagaatatgaattctatgatgaaacacaagatcaaagtacacaactagtaggttacgacattaaactcaaaaccaatgaggatgattttatggctatgatagatcagtgggtgtccatgattatatagatgaatcaattaataaagtagtatatggaagagagtctcacgtaagatggcgggatatatggcaagaacataatgatggcgtatacagtataggaaaggagtgcatagataatatatacgaagacaaccataccgtagacgaattctacaagatagacagcgtatcagatgtagatgacgcggaacacatatctccgataactaatgatgtatctacacaaacatgggaaaagaaatcagagttagatagatacatggaaatgtatcctcgtcatagatatagtaagcattctgtctttaagggattttctgacaaagttagaaaaaatgatttagacatgaatgtggtaaaagaattactttctaacggtgcatctctaacaattaaggatagcagtaataaggatccaataaccgtttattttcgaagaacgataatgaatttagaaatgattgatgaacgaaagtatatagtacactcctatctaaaaaattataaaaatttcgattatccatttttcaggaagttagttttgactaataaacattgtctcaacaattattataatataagcgacagcaaatatggaacaccgctacatatattggcgtctaataaaaaattaataactcctaattacatgaagttattagtgtataacggaaatgatataaacgcacgaggtgaagatacacaaatgcgaactccattacacaaatatttgtgtaaatttgtatatcataatattgaatatggtatccgatactataatgaaaagattatagacgcatttatagagttaggagccgatctaactattccaaatgacgatggaatgataccagtagtttactgtatacactcaaatgccgaatatggttataacaatattactaacataaagataatacgtaaactacttaatcttagtagacgtgcgtcacataatctatttagagatcgagtcatgcacgattatataagtaatacatatattgatcttgagtgtttagatattattagatcgttggatggattcgatatcaatggttactttgaaggacgtacaccacttcattgcgctatacaacataacttcactcagattgctaagtacttattagatcgaggagctgatatagtcgtacccaacacattgattatacatcagtacatacagtaaatagcatagatatggaggaggatacaaatatttcaaataaagttataaggtacaacactgtcaataatatatgggaaacattacctaacttctggactggaactataaatccaggcgtggtctcgcataaagatgatatatatgttgtatgcgacatcaaagatgaaaaaaatgttaaaacttgtatatttagatataacacgaatacgtataacggatgggaattggtcacgacgacagaaagcagattatcagctctgcatactattctttataacaataccataatgatgttacattgttatgaatcgtatatgttacaagatacatttaatgtgtacactcgcgaatggaatcatatgtgtcatcaacattcgaatagttatatcatgtacaatatactacccatctactaaatataatagaataaaataaatgagtatgatcattttagataacgattgattttatcattaccgcttcattcttatattctttgcttacggaacctatatttagaaacatctactaacgattttttatgcttgcattattaatggtatgtaatatgattgattgtgtacgcaataccaatttgttaagtatgaatacggggtacaaacataaactgaagtttaacattatttatttatgatatatatcgttattgtttggtctataccatggatatctttaaagaactaatcttaaaacacacggatgaaaatgttttgatttctccagtttctattttatctactttatctattctaaatcatggagcagctggttctacagctgaacaactatcaaaatatatagagaatatgaatgagaatacacccgatgacaataatgacatggacgtagatattccgtattgtgcgacactagctaccgcaaataaaatatacggtagcgatagtatcgagttccacgcctccttcctacaaaaaataaaagacgattttcaaactgtaaactttaataatgctaaccaaacaaaggaactaatcaacgaatgggttaagacaatgacaaatggtaaaattaattccttattgactagtccgctatccattaatactcgtatgacagttgttagcgccgtccattttaaagcaatgtggaaatatccattttctaaacatcttacatatacagacaagttttatatttctaagaatatagttaccagtgttgatatgatggtgagcactgagaataacttgcaatatgtacatattaatgaattattcggaggattctctattatcgatattccatacgagggaaactctagtatggtaattatactaccggacgacatagaaggtatatataacatagaaaaaaatataacagatgaaaaatttaaaaaatggtgtggtatgttatctactaaaagtatagacttgtatatgccaaagtttaaagtggaaatgacagaaccgtataatctggtaccgattttagaaaatttaggacttactaatatattcggatattatgcagattttagcaagatgtgtaatgaaactatcactgtagaaaaatttctacatacgacgtttatagatgttaatgaggagtatacagaagcatcggccgttacaggagtatttatgactaacttttcgatggtatatcgtacgaaggtctacataaaccatccattcatgtacatgattaaagacaacacaggacgtatactttttatagggaaatactgctatccgcaataaatataaacaaatagacttttatcacgtttatctatgtctaaatattacaaatagtaatagtataaactaaagctgataatacttaaaaaaataataatatcatttacaattaatagtataaactaaaaattaaacaaatcgttattataagtaatatcaaaatgatgatatacggattaatagcgtgtcttatattcgtgacttcatccatcgctagtccactttatattcccgttattccacccatttcggaagataaatcgttcaatagtgtagaggtattagtttccttgtttagagatgaccaaaaagactatacggtaacttctcagttcaataactacactatcgataccaaagactggactatcggcgtactatccacacctgatggtttggatataccattgactaatataacttattggtcacggtttactataggtcgtgcattgttcaaatcagagtctgaggatattttccaaaagaaaatgagtattctaggtgtttctatagaatgtaagaagtcgtcgacattacttacttttttgaccgtgcgtaaaatgactcgagtatttaataaatttccagatatggcttattatcgaggagactgtttaaaagccgtttatgtaacaatgacttataaaaatactaaaactggagagactgattacacgtacctctctaatggggggttgcctgcatactatcgtaatggggtcgatggttgattattgattagtatattccttattctttttattcacacaaaaagaacatttttataaacatgaaaccactgtctaaatgtaattatgatcttgatttatagatgaagatcagcctttagaggattttaaccagtatgtttaatatgaaaaaaataaacataacatattttgagattaagcgctattgtgcaagattatattagaatcaaattaatctttcatacgagaaaaataacgacatacgtcgtcaacaaattaaactttttatttattagttaactagcttatagaacttgctcattgttatgtttctaaaacgggtacgacatataggacaattatccgacgcaccggtttctcttcgtgttttatgccatatattgatgcatgttatgcaaaatatatgagtacacgaatccaataaaccaaagtatctatcgttttgagtaaacaacttcatagcaaattccacattctttttctttacttactctatacacgtcctcgtatttatccagtattttgatgatatccaactcagaaatggttgttgtattattgggtgtattgggagtataggtattattagctatgtaccaatttaccaaccctcttaatattgattgaacaatcacatcggttatccaatcaataaccacattaataactaaattgtagtgtatatatagaccatatatgtttctatttttttgacagttacgtatagtttcagtaagttttgattgttgtattcctgtatctctagataagttagtcatatagtcccttccggcgatacgttttttccaagcccgaaattgattagccaaatgtgtatttatttttgtgatattgatataatatgtaatgttattaatatttcggataatgcatactgttagtcttatatcatttggttcatctatgtattgtaatattgttacatgatctatagatgatgtattgattttggcaggatcgaattccatatccgcgactaaacagtgaaaaaaatgtaaatactttttaaattttaaattagtaaaacttttttttattttttatgattccaaaaatactgaatacaaagtcctaaattataaatatggagatcatactaccacaacttattattatgcatactcagccggtgtaatagatagatatatataattctattacaccggcagacaattaccgatcggtatttgtcgttaccaacataccgtataatatgtaatatacaattccataacccattgacagttgttatacatcaaaattgcaattcttttgattacgatgttataagaatgtagttaattgatgtatgatgttaatgtgtcctctttcctcttataacatcgtaatcaaaaacttttttataatatatacctaataatgtgtcttaatagttctcgtgattcgtcaaacaatcattcttataaaatataataaagcaacgtaaaacacataaaaataagcgtaactaataagacaatggatatttacgacgataaaggtctacagactattaaactgtttaataatgaatttgattgtataaggaatgacatcagagaattatttaaacatgtaactgattccgatagtatacaacttccgatggaagacaattctgatattatagaaaatatcagaaaaatactatatagacgattaaaaaatgtagaatgtgttgacatcgatagtacaataacttttatgaaatacgatccaaatgatgataataagcgtacgtgttctaattgggtacccttaactaataactatatggaatattgtctagtaatatatttggaaacaccgatatgtggaggcaaaataaaattataccaccctacaggaaatataaagtcggataaggatattatgtttgcaaagactctagactttaaatcaaagaaagtgttaactggacgtaaaacaattgccgttctagacatatccgtttcatataatagatcaatgactactattcactacaacgacgacgttgatatagatatacatactgataaaaatggaaaagagttatgttattgttatataacaatagatgatcattacttggttgatgtggaaactataggagttatagtcaatagatctggaaaatgtctgttagtaaataaccatctaggtataggtatcgttaaagataaacgtataagcgatagttttggagatgtatgtatggatacaatatttgacttttctgaagcacgagagttattttcattaactaatgatgataacaggaatatagcatgggacactgataaactagacgatgatacagatatatggactcccgtcacagaagatgattacaaatttctttctagactagtattgtatgcaaaatctcaatcggatactgtattcgactattatgttcttactggtgatacggaaccacccactgtattcattttcaaggtaactagattttactttaatatgccgaaataaaaaatttttgtataatatctagaggtagaggtattgtttagataaatacaaataacatagatacatcgcatacttagcatttttataaatatacataagacatacactttatacattttttttgtaaaaatactcataaaaaaatttataaaaattatggcacaaccatatcttgtataggtagtttagttcgtcgagtgaacctataaacagataatagacaacacgtaataataataatgcctactaatacaagcataataccgggagatgggatatatgacgttgtagtgtttgggttttctgaacgttgatagtctactaatactacatgctgacatctaatgcctgtataaccatgagagcatctacaatacataccgtcaatatctctagcgtggatacagtcaccgtgtaaacaatatccatctccctctggaccgcataatctgatagctggaatatctgttgtagcgtttgtaatttctggcgatgtcgtttcgatagcgttaccactatcggcgaatgatctgattatcatagcagcgaacaacaacatcagatatttcatcgacatttttgatggattttgtgtttatgctgtttctcagtgtgtgtttatgacaagattgggaattttatattattaattcagtaatataaactaataatatattgttaattgtgtaaataatataaaaataacaatacaatattgaatgtgttgctgttaaaaatgatcataaacacggagtttattttatatgtctcgcataaacattactaaaaaaatatattgttctgtttttctttcacatctttaattatgaaaaagtaaatcattatgagatggacgagattgtacgcatcgttcgcgacagtatgtggtacatacctaacgtatttatggacgacggtaagaatgaaggtcacgtttctgtcaacaatgtctgtcatatgtatttcacgttctttgatgtggatacatcgtctcatctgtttaagctagttattaaacactgcgatctgaataaacgaggtaactctccattacattgctatacgatgaatacacgatttaatccatctgtattaaagatattgttacaccacggcatgcgtaactttgatagcaaggatgaaaaaggacaccactatcaatcgataacaagatctttgatatactaacggacaccattgatgactttagtaaatcatccgatctattgctgtgttatcttagatataaattcaatgggagcttaaactattacgttctgtacaaaggatccgacgaggatgaactcacttctcttcattactactgtaaacacatatccacgttctacaaaagcaattattacaagttaagtcacactaagatgcgagccgagaagcgattcatctacgcgataatagattatggagcaaacattaacgcggttacacacttaccttcaacagtataccaaacatagtcctcgtgtggtgtatgctcttttatctcgaggagccgatacgaggatacgtaataatcttgattgtacacccatcatggaacgattgtgcaacaggtcatattctcataatgttactcaattggcacgaacaaaaggaagaaggacaacatctactttatctattcataaaacataatcaaggatacactctcaatatactacggtatctactagataggttcgacattcagaaagacgaatactataataccgcctttcaaaattgtaacaacaatgttgcctcatacatcggatacgacatcaaccttccgactaaagacggtattcgacttggtgtttgaaaacagaaacatcatatacaaggcggatgttgtgaatgacatcatccaccacagactgaaagtatctctacctatgattaaatcgttgttctacaagatgtctctccctacgacgattactacgtaaagaagataatagcctactgcctattaagggacgagtcattcgcggaactacatagtaaattctgtttaaacgaggactataaaagtgtatttatgaaaaatatatcattcgataagatagattccatcatcgtgacataagtcgccttaaagagattcgaatctccgacaccgacctgtatacggtatcacagctatcttaaagccatacattcagacagtcacatttcatttcccatgtacgacgatctcatagaacagtgccatctatcgatggagcgtaaaagtaaactcgtcgacaaagcactcaataaattagagtctaccatcggtcaatctagactatcgtatttgcctccggaaattatgcgcaatatcatctaaacagtatgttgtacgaaaagaaccattacaaatattatccatgatagaaagaaaatatctatatgattggagaagtaggaaacaggaacaagacgacgattactacattattaaatcatgaagtccgtattatactcgtatatattgtttctctcatgtataataataaacggaagagatatagcaccgcatgcaccatccgatggaaagtgtaaagacaacgaatacaaacgccataatttgtgtccgggaacatacgcttccagattatgcgatagcaagactaacacacaatgtacgccgtgtggttcgggtaccttcacatctcgcaataatcatttacccgcttgtctaagttgtaacggaagacgcgaccgtgtaacacgactcacaatagaatctgtgaatgctctcccggatattattgtcttctcaaaggatcatccggatgcaaggcatgtgtttcccaaacaaaatgtggaataggatacggagtatccggagacgtcatctgttctccgtgtggtctcggaacatattctcacaccgtctcttccgcagataaatgcgaacccgtacccagtaatacctttaactatatcgatgtggaaattaatctgtatccagttaacgaccactaccggtctcagcgaatccatctcaacgtcggaactaactattactatgaatcataaagactgtaatcccgtatttcgtgaggaatacttctccgtccttaataaggtagcaacttcaggtttctttacaggagaaaggtgtgcactctgaatttcgagattaaatgcaataacaaaaatttttcctccaaacagttaacgaaagcaaagaatgatgacggtatcatgccgcattcggagactgtctatctagcgtcgacatctatatactatatagtaataccaatactcaagactacgaaactgatacaatctcttatcatgtgggtaatgttctcgatgtcgatagccatatgcccggtagttgcgatatacataaactgatcactaattccaaacccacccgctttttatagtaagtttttcacccataaataataaatacaataattaatttctcgtaaaagtagaaaatatattctaatttattgcacggtaaggaagtagaatcataaagaacagtactcaatcaatagcaatcatgaaacaatatatcgtcctggcatgcatgtgcctgccagtcttcagcaatcatcctcatcctcctcctcgtgtacggaagaagaaaacaaacatcatatgggaatcgatgttattatcaaagtcacaaagcaagaccaaacaccgaccaatgataagatttgccaatccgtaacggaaattacagagtccgagtcagatccagatcccgaggtggaatcagaagatgattccacatcagtcgaggatgtagatcctcctaccacttattactccatcatcggtggaggtctgagaatgaactttggattcaccaaatgtcctcagattaaatccatctcagaatccgctgatggaaacacagtgaatgctagattgtccagcgtgtccccaggacaaggtaaggactctcccgcgatcactcatgaagaagctctggctatgatcaaagactgtgaggtgtctatcgacatcagatgtagcgaagaagagaaagacagcgacatcaagacccatccagtactcgggtctaacatctctcataagaaagtgagttacgaagatatcatcggttcaacgatcgtcgatacaaaatgtgtcaagaatctagagtttagcgttcgtatcggagacatgtgcaaggaatcatctgaacttgaggtcaaggatggatttaagtatgtcgacggatcggcatctgaaggtgcaaccgatgatacttcactcatcgattcaacaaaactcaaagcgtgtgtctgaatcgataactctattcatctgaaattggatgagtagggttaatcgaacgattcaggcacaccacgaattaaaaaagtgtaccggacactatattccggtttgcaaaacaaaaatgttcttaactacattcacaaaaagttacctctcgcgacttcttctttttctgtctcaatagtgtgatacgattatgacactattcctattcctattcctatttcctttcagggtatcacaaaaatattaaacctctttctgatggtctcataaaaaaagttttacaaaaatatttttattctctttctctctttgatggtctcataaaaaaagttttacaaaaatatttttattctctttctctctttgatggtctcataaaaaaagttttacaaaaatatttttattctctttctctctttgatggtctcataaaaaaagttttacaaaaatatttttattctctttctctctttgatggtctcataaaaaaagttttacaaaaatatttttattctctttctctctttgatggtctcataaaaaaagttttacaaaaatatttttattctctttctctctttgatggtctcataaaaaaagttttacaaaaatatttttattctctttctctctttgatggtctcataaaaaaagttttacaaaaatatttttattctctttctctctttgatggtctcataaaaaatattaaacctctttctgatggtgtcactaaaatatttttattctcattctcattttctctttctctcttcaatggagtcataaaatatttttattctctttctctcttcgatggtctcacaaaaatattaaacctctttctgatggtgtcactaaaatatttttattctcattctcattttctctttctctcttcaatggagtcataaaatatttttattctctttctctcttcgatggtctcacaaaaatattaaacctctttctgatggagtcgtaaaaaagttttatctctttctctcttcgatggtctcacaaaaatattaaacctctttctgatggagtcgtaaaaaagttttatctctttctctcttcgatggtctcacaaaaatattaaacctctttctgatggagtcgtaaaaaagttttatctctttctctcttcgatggtctcacaaaaatattaaacctctttctgatggagtcgtaaaaaagttttatctctttctctcttcgatggtctcacaaaaatattaaacctctttctgatggagtcgtaaaaaagttttatctctttctctcttcgatggtctcacaaaaatattaaacctctttctgatggagtcgtaaaaaagttttatctctttctctcttcgatggtctcacaaaaatattaaacctctttctgatggagtcgtaaaaaagttttatctctttctctcttcgatggtctcacaaaaatattaaacctctttctgatggagtcgtaaaaaagttttatctctttctctcttcgatggtctcacaaaaatattaaacctctttctgatggagtcgtaaaaaagttttatctctttctctcttcgatggtctcacaaaaatattaaacctctttctgatggagtcgtaaaaaagttttatctctttctctcttcgatggtctcacaaaaatattaaacctctttctgatggagtcgtaaaaaagttttatctctttctctcttcgatggtctcacaaaaatattaaacctctttctgatggagtcgtaaaaaagttttatctctttctctcttcgatggtctcacaaaaatattaaacctctttctgatggagtcgtaaaaaagttttatctctttctctcttcgatggtctcacaaaaatattaaacctctttctgatggagtcgtaaaaaagttttatctctttctctcttcgatggtctcacaaaaatattaaacctctttctgatggagtcgtaaaaaagttttatctctttctctcttcgatggtctcacaaaaatattaaacctctttctgatggagtcgtaaaaaagttttatctctttctctcttcgatggtctcacaaaaatattaaacctctttctgatggagtcgtaaaaaagttttatctctttctctcttcgatggtctcacaaaaatattaaacctctttctgatggagtcgtaaaaaagttttatctctttctctcttcgatggtctcactaaaatattttttattctctttctgatgcatcaactatttcttaaacaataacgtccaacaacatatactcgtcgagcttatcaacatcccctatgcccatctaggttaccagacaattgtatatcataaaataatgtttataatttacacgttaaaatcatataataaaacgtagatcgtataatattttttggtatataaatgatctagtaaaatccatgtaggggatactgctcacattttttctttggtacaaaatttcacacaagtttttatacagacaaattcttgtccatatattttaaaacattgacttttgtactaagaaaaatatctagatcaactatctctttctctttctctcttcgatggtctcacaaaaatattaaacctctttctgatggagtcgtaaaaaagttttatctctttctctcttcgatggtctcacaaaaatattaaacctctttctgatggagtcgtaaaaaagttttatctctttctctcttcgatggtctcacaaaaatattaaacctctttctgatggagtcgtaaaaaagttttatctctttctctcttcgatggtctcacaaaaatattaaacctctttctgatggagtcgtaaaaaagttttatctctttctctcttcgatggtctcacaaaaatattaaacctctttctgatggagtcgtaaaaaagttttatctctttctctcttcgatggtctcacaaaaatattaaacctctttctgatggagtcgtaaaaaagttttatctctttctccttcgatggtctcacaaaaatattaaacctctttctgatggagtcgtaaaaaagttttatctctttctctcttcgatggtctcacaaaaatattaaacctctttctgatggagtcgtaaaaaagttttatctctttctctcttcgatggtctcacaaaaatattaaacctctttctgatggagtcgtaaaaaagttttatctctttctccttcgatggtctcacaaaaatattaaacctctttctgatggagtcgtaaaaaagttttatctctttctccttcgatggtctcacaaaaatattaaacctctttctgatggagtcgtaaaaaagttttatctctttctctcttcgatggtctcacaaaaatattaaacctctttctgatggagtcgtaaaaaagttttatctctttctctcttcgatggtctcacaaaaatattaaacctctttctgatggtctctataaagcgatcgatctttcttacactctagagtttcctacagtcatgggtcacacatttttttctagacactaaataaaattagtaaaattaaattaattataaaattatatatataatttactaactttagttagataaattaataatatataagttttagtacattaatattatattttaaat

SEQ ID NO: 202 - DNA, 195458 bp, Artificial Sequence
  GLV-0b358
atttaaaatataatattaatgtactaaaacttatatattattaatttatctaactaaagttagtaaattatatatataattttataattaatttaattttactaattttatttagtgtctagaaaaaaatgtgtgacccatgactgtaggaaactctagagtgtaagaaagatcgatcgctttatagagaccatcagaaagaggtttaatatttttgtgagaccatcgaagagagaaagagataaaacttttttacgactccatcagaaagaggtttaatatttttgtgagaccatcgaagagagaaagagataaaacttttttacgactccatcagaaagaggtttaatatttttgtgagaccatcgaaggagaaagagataaaacttttttacgactccatcagaaagaggtttaatatttttgtgagaccatcgaaggagaaagagataaaacttttttacgactccatcagaaagaggtttaatatttttgtgagaccatcgaagagagaaagagataaaacttttttacgactccatcagaaagaggtttaatatttttgtgagaccatcgaagagagaaagagataaaacttttttacgactccatcagaaagaggtttaatatttttgtgagaccatcgaaggagaaagagataaaacttttttacgactccatcagaaagaggtttaatatttttgtgagaccatcgaagagagaaagagataaaacttttttacgactccatcagaaagaggtttaatatttttgtgagaccatcgaagagagaaagagataaaacttttttacgactccatcagaaagaggtttaatatttttgtgagaccatcgaagagagaaagagataaaacttttttacgactccatcagaaagaggtttaatatttttgtgagaccatcgaagagagaaagagataaaacttttttacgactccatcagaaagaggtttaatatttttgtgagaccatcgaagagagaaagagataaaacttttttacgactccatcagaaagaggtttaatatttttgtgagaccatcgaagagagaaagagaaagagatagttgatctagatatttttcttagtacaaaagtcaatgttttaaaatatatggacaagaatttgtctgtataaaaacttgtgtgaaattttgtaccaaagaaaaaatgtgagcagtatcccctacatggattttactagatcatttatataccaaaaaatattatacgatctacgttttattatatgattttaacgtgtaaattataaacattattttatgatatacaattgtctggtaacctagatgggcataggggatgttgataagctcgacgagtatatgttgttggacgttattgtttaagaaatagttgatgcatcagaaagagaataaaaaatattttagtgagaccatcgaagagagaaagagataaaacttttttacgactccatcagaaagaggtttaatatttttgtgagaccatcgaagagagaaagagataaaacttttttacgactccatcagaaagaggtttaatatttttgtgagaccatcgaagagagaaagagataaaacttttttacgactccatcagaaagaggtttaatatttttgtgagaccatcgaagagagaaagagataaaacttttttacgactccatcagaaagaggtttaatatttttgtgagaccatcgaagagagaaagagataaaacttttttacgactccatcagaaagaggtttaatatttttgtgagaccatcgaagagagaaagagataaaacttttttacgactccatcagaaagaggtttaatatttttgtgagaccatcgaagagagaaagagataaaacttttttacgactccatcagaaagaggtttaatatttttgtgagaccatcgaagagagaaagagataaaacttttttacgactccatcagaaagaggtttaatatttttgtgagaccatcgaagagagaaagagataaaacttttttacgactccatcagaaagaggtttaatatttttgtgagaccatcgaagagagaaagagataaaacttttttacgactccatcagaaagaggtttaatatttttgtgagaccatcgaagagagaaagagataaaacttttttacgactccatcagaaagaggtttaatatttttgtgagaccatcgaagagagaaagagataaaacttttttacgactccatcagaaagaggtttaatatttttgtgagaccatcgaagagagaaagagataaaacttttttacgactccatcagaaagaggtttaatatttttgtgagaccatcgaagagagaaagagataaaacttttttacgactccatcagaaagaggtttaatatttttgtgagaccatcgaagagagaaagagataaaacttttttacgactccatcagaaagaggtttaatatttttgtgagaccatcgaagagagaaagagataaaacttttttacgactccatcagaaagaggtttaatatttttgtgagaccatcgaagagagaaagagataaaacttttttacgactccatcagaaagaggtttaatatttttgtgagaccatcgaagagagaaagagataaaacttttttacgactccatcagaaagaggtttaatatttttgtgagaccatcgaagagagaaagagaataaaaatattttatgactccattgaagagagaaagagaaaatgagaatgagaataaaaatattttagtgacaccatcagaaagaggtttaatatttttgtgagaccatcgaagagagaaagagaataaaaatattttatgactccattgaagagagaaagagaaaatgagaatgagaataaaaatattttagtgacaccatcagaaagaggtttaatattttttatgagaccatcaaagagagaaagagaataaaaatatttttgtaaaactttttttatgagaccatcaaagagagaaagagaataaaaatatttttgtaaaactttttttatgagaccatcaaagagagaaagagaataaaaatatttttgtaaaactttttttatgagaccatcaaagagagaaagagaataaaaatatttttgtaaaactttttttatgagaccatcaaagagagaaagagaataaaaatatttttgtaaaactttttttatgagaccatcaaagagagaaagagaataaaaatatttttgtaaaactttttttatgagaccatcaaagagagaaagagaataaaaatatttttgtaaaactttttttatgagaccatcaaagagagaaagagaataaaaatatttttgtaaaactttttttatgagaccatcagaaagaggtttaatatttttgtgataccctgaaaggaaataggaataggaataggaatagtgtcataatcgtatcacactattgagacagaaaaagaagaagtcgcgagaggtaactttttgtgaatgtagttaagaacatttttgttttgcaaaccggaatatagtgtccggtacacttttttaattcgtggtgtgcctgaatcgttcgattaaccctactcatccaatttcagatgaatagagttatcgattcagacacacgctttgagttttgttgaatcgatgagtgaagtatcatcggttgcaccttcagatgccgatccgtcgacatacttaaatccatccttgacctcaagttcagatgattccttgcacatgtctccgatacgaacgctaaactctagattcttgacacattttgtatcgacgatcgttgaaccgatgatatcttcgtaactcactttcttatgagagatgttagacccgagtactggatgggtcttgatgtcgctgtctttctcttcttcgctacatctgatgtcgatagacacctcacagtctttgatcatagccagagcttcttcatgagtgatcgcgggagagtccttaccttgtcctggggacacgctggacaatctagcattcactgtgtttccatcagcggattctgagatggatttaatctgaggacatttggtgaatccaaagttcattctcagacctccaccgatgatggagtaataagtggtaggaggatctacatcctcgactgatgtggaatcatcttctgattccacctcgggatctggatctgactcggactctgtaatttccgttacggattggcaaatcttatcattggtcggtgtttggtcttgctttgtgactttgataataacatcgattcccatatgatgtttgttttcttcttccgtacacgaggaggaggatgaggatgattgctgaagactggcaggcacatgcatgccaggacgatatattgtttcatgattgctattgattgagtactgttctttatgattctacttccttaccgtgcaataaattagaatatattttctacttttacgagaaattaattattgtatttattatttatgggtgaaaaacttactataaaaagcgggtgggtttggaattagtgatcagtttatgtatatcgcaactaccgggcatatggctatcgacatcgagaacattacccacatgataagagattgtatcagtttcgtagtcttgagtattggtattactatatagtatatagatgtcgacgctagatagacagtctccgaatgcggcatgataccgtcatcattctttgctttcgttaactgtttggaggaaaaatttttgttattgcatttaatctcgaaattcagagtgcacacctttctcctgtaaagaaacctgaagttgctaccttattaaggacggagaagtattcctcacgaaatacgggattacagtctttatgattcatagtaatagttagttccgacgttgagatggattcgctgagaccggtagtggtcgttaactggatacagattaatttccacatcgatatagttaaaggtattactgggtacgggttcgcatttatctgcggaagagacggtgtgagaatatgttccgagaccacacggagaacagatgacgtctccggatactccgtatcctattccacattttgtttgggaaacacatgccttgcatccggatgatcctttgagaagacaataatatccgggagagcattcacagattctattgtgagtcgtgttacacggtcgcgtcttccgttacaacttagacaagcgggtaaatgattattgcgagatgtgaaggtacccgaaccacacggcgtacattgtgtgttagtcttgctatcgcataatctggaagcgtatgttcccggacacaaattatggcgtttgtattcgttgtctttacactttccatcggatggtgcatgcggtgctatatctcttccgtttattattatacatgagagaaacaatatatacgagtataatacggacttcatgatttaataatgtagtaatcgtcgtcttgttcctgtttcctacttctccaatcatatagatattttctttctatcatggataatatttgtaatggttcttttcgtacaacatactgtttagatgatattgcgcataatttccggaggcaaatacgatagtctagattgaccgatggtagactctaatttattgagtgctttgtcgacgagtttacttttacgctccatcgatagatggcactgttctatgagatcgtcgtacatgggaaatgaaatgtgactgtctgaatgtatggctttaagatagctgtgataccgtatacaggtcggtgtcggagattcgaatctctttaaggcgacttatgtcacgatgatggaatctatcttatcgaatgatatatttttcataaatacacttttatagtcctcgtttaaacagaatttactatgtagttccgcgaatgactcgtcccttaataggcagtaggctattatcttctttacgtagtaatcgtcgtagggagagacatcttgtagaacaacgatttaatcataggtagagatactttcagtctgtggtggatgatgtcattcacaacatccgccttgtatatgatgtttctgttttcaaacaccaagtcgaataccgtctttagtcggaaggttgatgtcgtatccgatgtatgaggcaacattgttgttacaattttgaaaggcggtattatagtattcgtctttctgaatgtcgaacctatctagtagataccgtagtatattgagagtgtatccttgattatgttttatgaatagataaagtagatgttgtccttcttccttttgttcgtgccaattgagtaacattatgagaatatgacctgttgcacaatcgttccatgatgggtgtacaatcaagattattacgtatcctcgtatcggctcctcgagataaaagagcatacaccacacgaggactatgtttggtatactgttgaaggtaagtgtgtaaccgcgttaatgtttgctccataatctattatcgcgtagatgaatcgcttctcggctcgcatcttagtgtgacttaacttgtaataattgcttttgtagaacgtggatatgtgtttacagtagtaatgaagagaagtgagttcatcctcgtcggatcctttgtacagaacgtaatagtttaagctcccattgaatttatatctaagataacacagcaatagatcggatgatttactaaagtcatcaatggtgtccgttagtatatcaaagatcttgttatcgattgatagtggtgtcctttttcatccttgctatcaaagttacgcatgccgtggtgtaacaatatctttaatacagatggattaaatcgtgtattcatcgtatagcaatgtaatggagagttacctcgtttattcagatcgcagtgtttaataactagcttaaacagatgagacgatgtatccacatcaaagaacgtgaaatacatatgacagacattgttgacagaaacgtgaccttcattcttaccgtcgtccataaatacgttaggtatgtaccacatactgtcgcgaacgatgcgtacaatctcgtccatctcataatgatttactttttcataattaaagatgtgaaagaaaaacagaacaatatatttttttagtaatgtttatgcgagacatataaaataaactccgtgtttatgatcatttttaacagcaacacattcaatattgtattgttatttttatattatttacacaattaacaatatattattagtttatattactgaattaataatataaaattcccaatcttgtcataaacacacactgagaaacagcataaacacaaaatccatcaaaaatgtcgatgaaatatctgatgttgttgttcgctgctatgataatcagatcattcgccgatagtggtaacgctatcgaaacgacatcgccagaaattacaaacgctacaacagatattccagctatcagattatgcggtccagagggagatggatattgtttacacggtgactgtatccacgctagagatattgacggtatgtattgtagatgctctcatggttatacaggcattagatgtcagcatgtagtattagtagactatcaacgttcagaaaacccaaacactacaacgtcatatatcccatctcccggtattatgcttgtattagtaggcattattattattacgtgttgtctattatctgtttataggttcactcgacgaactaaactacctatacaagatatggttgtgccataatttttataaatttttttatgagtatttttacaaaaaaaatgtataaagtgtatgtcttatgtatatttataaaaatgctaagtatgcgatgtatctatgttatttgtatttatctaaacaatacctctacctctagatattatacaaaaattttttatttcggcatattaaagtaaaatctagttaccttgaaaatgaatacagtgggtggttccgtatcaccagtaagaacataatagtcgaatacagtatccgattgagattttgcatacaatactagtctagaaagaaatttgtaatcatcttctgtgacgggagtccatatatctgtatcatcgtctagtttatcagtgtcccatgctatattcctgttatcatcattagttaatgaaaataactctcgtgcttcagaaaagtcaaatattgtatccatacatacatctccaaaactatcgcttatacgtttatctttaacgatacctatacctagatggttatttactaacagacattttccagatctattgactataactcctatagtttccacatcaaccaagtaatgatcatctattgttatataacaataacataactcttttccatttttatcagtatgtatatctatatcaacgtcgtcgttgtagtgaatagtagtcattgatctattatatgaaacggatatgtctagaacggcaattgttttacgtccagttaacactttctttgatttaaagtctagagtctttgcaaacataatatccttatccgactttatatttcctgtagggtggtataattttattttgcctccacatatcggtgtttccaaatatattactagacaatattccatatagttattagttaagggtacccaattagaacacgtacgcttattatcatcatttggatcgtatttcataaaagttattgtactatcgatgtcaacacattctacattttttaatcgtctatatagtatttttctgatattttctataatatcagaattgtcttccatcggaagttgtatactatcggaatcagttacatgtttaaataattctctgatgtcattccttatacaatcaaattcattattaaacagtttaatagtctgtagacctttatcgtcgtaaatatccattgtcttattagttacgcttatttttatgtgttttacgttgctttattatattttataagaatgattgtttgacgaatcacgagaactattaagacacattattaggtatatattataaaaaagtttttgattacgatgttataagaggaaagaggacacattaacatcatacatcaattaactacattcttataacatcgtaatcaaaagaattgcaattttgatgtataacaactgtcaatgggttatggaattgtatattacatattatacggtatgttggtaacgacaaataccgatcggtaattgtctgccggtgtaatagaattatatatatctatctattacaccggctgagtatgcataataataagttgtggtagtatgatctccatatttataatttaggactttgtattcagtatttttggaatcataaaaaataaaaaaaagttttactaatttaaaatttaaaaagtatttacatttttttcactgtttagtcgcggatatggaattcgatcctgccaaaatcaatacatcatctatagatcatgtaacaatattacaatacatagatgaaccaaatgatataagactaacagtatgcattatccgaaatattaataacattacatattatatcaatatcacaaaaataaatacacatttggctaatcaatttcgggcttggaaaaaacgtatcgccggaagggactatatgactaacttatctagagatacaggaatacaacaatcaaaacttactgaaactatacgtaactgtcaaaaaaatagaaacatatatggtctatatatacactacaatttagttattaatgtggttattgattggataaccgatgtgattgttcaatcaatattaagagggttggtaaattggtacatagctaataatacctatacacccaataatacaacaaccatttctgagttggatatcatcaaaatactggataaatacgaggacgtgtatagagtaagtaaagaaaaagaatgtggaatttgctatgaagttgtttactcaaaacgatagatactttggtttattggattcgtgtactcatatattttgcataacatgcatcaatatatggcataaaacacgaagagaaaccggtgcgtcggataattgtcctatatgtcgtacccgttttagaaacataacaatgagcaagttctataagctagttaactaataaataaaaagtttaatttgttgacgacgtatgtcgttatttttctcgtatgaaagattaaattcaattcaattcgttgtttctaatataatctgccgtattggatggattctcaagacaattgcatttagattatattatcatgaataaaaatagtagcacgcactacttcagccaaatattcttttttgaaacgccatctatcgtagtgaggacacaagtgaacctataattatcaaatttattagtatcagtcacatgaaggactttctgtagagtgacgattctaccatctatggtactaacggtttcatcctccttgataccctcacccaaatgttctataaatttagcatcctcgtccgatctcatatcctttgccaaccaatacatgtagctaaaattaggcataaatttcacacatccagtgcaacgaaattctccagaagatgttacgatgtttaggttaggacatttgatttcgtcggcattaacatatgggtgaacacacccatacatgaaagcgatgagaaataggattctcatcttgccaaaatatcactagaaaaaatttatttatcaattttaaaggtataaaaaatacttattgttgctcgaatattttgtatttgatggtatacggaagattagaaatgtaggtattatcatcaactgattctatggttttatgtattctatcatgtttcactattgcgtcggaaataatatcatatgcttccacatatattttattttgttttaactcataatactcacgtaattctggattattggcatatctatgaataattttagctccatgatcagtaaatattaatgagaacatagtattaccacctaccattatttttttcatttcgttcaattcttgattgcaaagatctatataatcattatagcgttgacttatggactctggaatcttagacgatgtacagtcatctataatcatggcatatttaatacattgttttatagcatagtagttatctacgatgttagatatttctctcaatgaatcaatcacacaatctaatgtaggtttatgacataatagcattttcagcagttcaatgtttctagattcgttgatggcaatggctatacatgtatatccgttatttgatctaatgttgacatctgaaccggattctagcagtaaagatactagagattgtttattatatctaacagccttgtgaagaagtgtttctcctcgtttgtcaatcatgttaatgtctttaagataaggtaggcaaatgtttatagtactaagaattgggcaagcataagacatgtcacaaagaccctttttgtatgtataagtgtaaaaattataacattcatagttggatttacataggtgtccaatcgggatctctccatcatcgagataattgatggcatctcccttccttttttagtagatatttcatcgtgtaagaatcaatattaatatttctaaagtattcgtgtatagcctctttatttaccacagttccatattccactagagggatatcgccgaatgtcatatactcaattagtatatgttggaggacatccgagttcattgttttcaatatcaaaaagatggtttccttatcatttctccatagtggtacaatactacacattattccgtgcggctttccattttccaaaaacaatttgaccaaatctaaatctacatctttattgtatctataatcactatttagataatcagccataattactcgagtgcaacatgttagatcgtctatatatgaataagcagtgttatctattcctttcattaacaatttaacgatgtctatatctatatgagatgacttaatataatattgaagagctgtacaatagtttttatctatagaagacggcttgattccgtgattaattagacatttaacaacttccggacgcacatatgctctcgtatccgactttgaatacagatgagagatgatatacagatgcaatacggtaccgcaatttcgtagttgataatcatcatacgcgtatcagtactcgtcctcataaagaacactgcagccattttctatgaacaaatcaataattttaggaacaggatcattgtcattacataattttctataactgaacgatggttttcacatttaacactcaagtcaaatccatgttctaccaacacctttatcaagtcaacgtctacatttttggatttcatatagctgaatatattaaagtcatttatgttgctaaatccagtggcttctagtagagccatcgctatatcctttaactttaacatgtctactatttgtgtattcttctaatggggtagctgtctccaatttttgcgtaatggattagtgccactgtctagtagtagtttgacgacctcgacattattacaatgctcattaaaaaggtatgcgtgtaaagcattattcttgaattggttcctggtatcattaggatctctgtctctcaacatctgtttaagttcatcgagagccacctcctcattttccagatagtcaaacattttgactgaatgagctactgtgaactctatacacccacacaactaatgtcattaaatattatttttttgaatgtatttataccatgtcaaaaacttgtacaattattaataaaaataatttagtgtttaaattttaccagttccagattttacacctccgttaaccccactttttacaccactggacgatcctcctccccacattccaccgccaccagatgtataagttttagatcctttattactaccatcatgtccatggataaagacactccacatgccgccactactaccccctttagaagacatattaataagacttaaggacaagtttaacaataaaattaatcacgagtaccctactaccaacctacactattatatgattatagtttctatttttacagtaccttaactaaagtctctagtcacaagagcaatactaccaacctacactattatatgattatagtttctatttttataggaacgcgtacgagaaaatcaaatgtctaatttctaacggtagtgttgataaacgattatcgtcaatggatacctcctctatcatgtcgtctattttcttactttgttctattaacttattagcattatatattatttgattataaaacttatattgcttattagcccaatctgtaaatatcggattattaacatatcgtttctttgtaggtttatttaacatgtacatcactgtaagcatgtccgtaccatttattttaatttgacgcatatccgcaatttctttttcgcagtcggttataaattctatatatgatggatacatgctacatgtgtacttataatcgactaatatgaagtacttgatacatattttcagtaacgatttattattaccacctatgaataagtacctgtgatcgtctaggtaatcaactgttttcttaatacattcgatggttggtaatttactcagaataatttccaatatcttaatatataattctgctatttctgggatatatttatctgccagtataacacaaatagtaatacatgtaaacccatattttgttattatattaatgtctgcgccattatctattaaccattctactaggctgacactatgcgacttaatacaatgataaagtatactacatccatgtttatctattttgtttatatcatcaatatacggcttacaaagttttagtatcgataacacatccaactcacgcatagagaaggtagggaataatggcataatatttattaggttatcatcattgtcattatctacaactaagtttccattttttaaaatatactcgacaactttaggatctctattgccaaatttttgaaaatatttatttatatgcttaaatctatataatgtagctccttcatcaatcatacatttaataacattgatgtatactgtatgataagatacatattctaacaatagatcttgtatagaatctgtatatcttttaagaattgtggatattaggatattattacgtaaactattacacaattctaaaatataaaacgtatcacggtcgaataatagttgatcaactatataattatcgattttgtgatttttcttcctaaactgtttacgtaaatagttagatagaatattcattagttcatgaccactatagttactatcgaataacgcgtcaaatatttcccgtttaatatcgcatttgtcaagataataatagagtgtggtatgttcacgataagtataataacgcatctcttttttgtgtgaaattaaatagtttatcacgtccaaagatgtagcataaccatcttgtgacctagtaataatataataatagagaactgttttacccattctatcatcataatcagtggtgtagtcgtaatcgtaatcgtctaattcatcatcccaattataatattcaccagcacgtctaatctgttctattttgatcttgtatccatactgtatgttgctacatgtaggtattcctttatccaataatagtttaaacacatctacattgggatttgatgttgtagcgtatttctctacaatattaataccatttttgatactatttatttctatacctttcgaaattagtaatttcaataagtctatatcgatgttatcagaacatagatattcgaatatatcaaaatcattgatatttttatagtcgactgacgacaataacaaaatcacaacatcgtttttgatattattatttttcttggtaacgtatgcctttaatggagtttcaccatcatactcatataatggatttgcaccactttctatcaatgattgtgcactgctggcatcgatgttaaatgttttacaactatcatagagtatcttatcgttaaccatgattggttgttgatgctatcgcattttttggtttctttcatttcagttatgtatggatttagcacgtttgggaagcatgagctcatatgatttcagtactgtagtgtcagtactattagtttcgatcagatcaatgtctagatctatagaatcaaaacacgataggtcagaagataatgaatatctgtacgcttctttttgtactgtaacttctggttttgttagatggttgcatcgtgctttaacatcaatggtacaaattttatcctcgctttgtgtatcatattcgtctctagtataaaattctatattcagattatcatgcgatgtgtatacgctaacggtatcaataaacggagcacaccatttagtcataacagtaatccaaaattttttaaagtatatcttaacgaaagaagttgtgtcattgtctacggtgtatggtactagatcctcataagtgtatatatctagagtaatgtttaatttattaaatggttgataatatggatcctcatgacaatttccgaagatggaaatgagatatagacatgcaataaatctaatcgaagacatggttactccttaaaaaaatacgaataatcaccttggctatttagtaagtgtcatttaacactatactcatattaatccatggactcataatctctatacgggattaacggatgttctatatacggggatgagtagttttcttctttaactttatactttttactaatcatatttagactgatgtatgggtaatagtgtttaaagagttcgttctcatcatcagaataaatcaatatctctgtttttttgttatacagatgtattacagcctcatatattacgtaatagaacgtgtcatctaccttattaactttcaccgcatagttgtttgcaaatacggttaatcctttgacctcgtcgatttccgaccaatctgggcgtataatgaatctaaactttaatttcttgtaatcattcgaaataatttttagtttgcatccgtagttatcccctttatgtaactgtaaatttctcaacgcgatatctccattaataatgatgtcgaattcgtgctgtatacccatactgaatggatgaactaacgaatatcaacggcgttaatagtaatttactttttcatctttacatattgggtactagttttactatcataagtttataaattccacaagctactatggaataagccaaccatcttagtataccacacatgtcttaaagtttattaattaattacatgttgttttatatatatcgctacgaatttaaagagaaatcagtttaggaagaaaaaaattatctatctacatcatcacgtctctgtattctacgatagagtgctactttaagatgagacatatccgtgtcatcaaaaatatactccattaaaatgattattccggcagcgaacttgatattggatatatcacaacctttgttaatatctacgacaatagacagcagtcccatggttccataaacagtgagtttatctttctttgaagcgatagtttgtagagatcttataaaaccgtcaaacgacatcgcatttatatctttagctaattcatatatgttaccatcgtaatatctaaccgcgtctatcttaaacgtttccatcgctttaaagacgtttccgatagatggtctcatttcatcagtcatactgagccaacaaatataatcgtgtataacatctttgatagaatcagactctaaagaaaacgaatcggctttattatacgcattcatgataaacttaatgaaaaatgtttttcgttgtttaagttggatgaatagtatgtcttaataattgttattatttcattaattaatatttagtaacgagtacactctataaaaacgagaatgacataactagttatcaaagtgtctaggacgcgtaattttcatatggtatagatcctgtaagcattgtctgtattctggagctattttctttatcgcattagtaagttcagaatatgttataaatttaaatcgaataacgaacatgactttagtaaagtcgtctatattaactcttttattttctagccatcgtaataccatgtttaagatagtatattctctagttactacgatctcatcgttgtctagaatatcacatactgaatctacatccaattttagaaattggtctgtgttacatatctcttctatattattgttgatgtattgtcgtagaaaactattacgtagaccattttctttataaaacgaatatatagtactccaattatctttaccgatatatttgcacacataatccattctctcaatcactacatctttaagattttcgttgttaagatatttggctaaactatataattctattagatcatcaacagaatcagtatatatttttctagatccaaagacgaactctttggcgtcctctataatattcccagaaaagatattttcgtgttttagtttatcgagatctgatctgttcatatacgccatgattgtacggtacgttatgataaccgcataaaataaaaatccattttcatttttaaccaatactattcataattgagattgatgtaatactttgttactttgaacgtaaagacagtacacggatccgtatctccaacaagcacgtagtaatcaaatttggtgttgttaaacttcgcaatattcatcaatttagatagaaacttatactcatcatctgttttaggaatccatgtattattaccactttccaacttatcattatcccaggctatgtttcgtccatcatcgttgcgcagagtgaataattcttttgtattcggtagttcaaatatatgatccatgcatagatcggcaaagctattgtagatgtgatttttcctaaatctaatataaaactcgtttactagcaaacactttcctgatttatcgaccaagacacatatggtttctaaatctatcaagtggtggggatccatagttatgacgcagtaacatagattattacattcttgactgtcgctaatatctaaatatttattgttatcgtattggattctgcatatagatggcttgtatgtcaaagatatagaacacataaccaatttatagtcgcgctttacattctcgaatctaaagttaagagatttagaaaacattatatcctcggatgatgttatcactgtttctggagtaggatatattaaagtctttacagatttcgtccgattcaaataaatcactaaataatatcccacattatcatctgttagagtagtatcattaaatctattatattttatgaaagatatatcactgctcacctctatatttcgtacatttttaaactgtttgtataatatctctctgatacaatcagatatatctattgtgtcggtagacgataccgttacatttgaattaatggtgttccattttacaacttttaacaagttgaccaattcatttctaatagtatcaaactctccatgattaaatattttaatagtatccattttatatcactacggacacaaagtagctgacataaaccattgtataatttttatgttttatgtttattagcgtacacattttggaagttccggcttccatgtatttcctggagagcaagtagatgatgaggaaccagatagtttatatccgtacttgcacttaaagtctacattgtcgttgtatgagtatgatcttttaaacccgctagacaagtatccgtttgatattgtaggatgtggacatttaacaatctgacacgtgggtggatcggaccattctcctcctgaacacaggacaccagagttaccaatcaacgaatatccactattgcaactataagttacaacgctcccatcggtataaaaatcctcgtatccgttatgtcttccgttggatatagatggaggggattggcatttaacagattcacaaataggtgcctcgggattccataccatagatccagtagatcctaattcacaatacgatttagattcaccgatcaaatgatatccgctattacaagagtacgttatactagagccaaagtctactccaccaatatcaagttggccattatcgatatctcgaggcgatgggcatctccgtttaatacattgattaaagagtgtccatccagtacctgtacatttagcatatataggtcccattttttgctttctgtatccaggtagacatagatattctatagtgtctcctatgttgtaattagcattagcatcagtctccacactattcttaaatttcatattaatgggtcgtgacggaatagtacagcatgatagaacgcatcctattcccaacaatgtcaggaacgtcacgctctccaccttcatatttatttatccgtaaaaatgttatcctggacatcgtacaaataataaaaagcccatatatgttcgctattgtagaaattgtttttcacagttgctcaaaaacgatggcagtgacttatgagttacgttacactttggagtctcatctttagtaaacatatcataatattcgatattacgagttgacatatcgaacaaattccaagtatttgattttggataatattcgtattttgcatctgctataattaagatataatcaccgcaagaacacacgaacatctttcctacatggttaaagtacatgtataattctatccatttgtcttccttaactatatatttgtatagataattacgagtctcgtgagtaattccagtaattacatagatgtcgccgtcgtactctacagcataaactatactatgatgtctaggcatgggagacttttttatccaacgatttttagtgaaacattccacatcgtttaatactacatatttttcatacgtggtataaactccacccattacatatatatcatcgtttacgaataccgacgcgcctgaatatctaggagtaattaagtttggaagtcttatccatttcgaagtgccgtgtttcaaatattctgccacacccgttgaaatagaaaattctaatcctcctattacatataactttccatcgttaacacaagtactaacttctgattttaacgacgacatattagtaaccgttttccattttttcgtttcaagatctacccgcgatacggaataaacatgtctattgttaatcatgccgccaataatgtatagacaattatgtaaaacatttgcattatagaattgtctatctgtattaccgactatcgtccaatattctgttctaggagagtaatgggttattgtggatatataatcagagtttttaatgactactatattatgttttataccatttcgtgtcactggctttgtagatttggatatagttaatcccaacaatgatatagcattgcgcatagtattagtcataaacttgggatgtaaaatgttgatgatatctacatcgtttggatttttatgtatccactttaataatatcatagctgtaacatcctcatgatttacgttaacgttttcgtgggataagatagttgtcagttcatcctttgataattttccaaattctggatcggatgtcaccgcagtaatattgttgattatttctgacatcgacgcattatatagttttttaattccatatcttttagaaaagttaaacatccttatacaatttgtggaattaatattatgaatcatagtttttacacatagatctactacaggcggaacatcaattattatggcagcaactagtatcatttctacattgtttatggtgatgtttatcttcttccagcgtatatagtctaatagcgattcaaacgcgtgatagtttataccattcaatataatcgcttcatcctttagatggtgatcctgaattcgtttaaaaaaattatacggagatgccgtaataatttccttattcacttgtataatttccccattgatagaaaatatcacgctttccattcttgaagtactataagtaattatagtataatgtaaaggtttatatattcaatattttttataaaaaaatcattttgacattaattcctttttaaatttccgtctatcatctatagaaacgtattctatgaatttataaaatgcttttacgtgtcctatcgtaggcgatagaaccgctaaaaagcctatcgaatttctacaaaagaatctgttatatggtatagggagagtataaaacattaaatgtccgtacttattaaagtattcagtagccaatcctaactctttcgaatacttattaatggctcttgttctgtacgaatctatttttttgaacaacggacctagtggtatatcttgttctatgtatctaaaataatgtctgactagatccgttagtttaatatcctcagtcatcttgtctagaatggcaaatctaactgcgggtttaggctttagtttagtttttatatctacatctatgtctttatctaacaccaaaaatataatagctaatattttattacaatcatccggatattcttctacgatctcactaactaatgtttctttggttatactagtatagtcactatcggacaaataaagaaaatcagatgatcgatgaataatacatttaaattcatcatctgtaagatttttgagatgtctcattaaaatattattagggtcagtactcattatcattcggcagctattacttattttatttttctgtattttattatttttcaccatatagatcaatcattagatcatcaaaatatgtttcaatcatcctaaagagtatggtgaatgactcttcccatctaatttctgaacgttcaccaatgtctctagccactttggcactaatagcgatcattcgcttagcgtcttctatattattaactggttgattcaatctatctagcaatggaccgtcggacagcgtcattctcatgttcttaatcaatgtacatacatcgccgtcatctaccaattcatccaacaacataagctttttaaaatcatcattataataggtttgatcgttgtcatttctccaaagaatatatctaataagtagagtcctcatgcttagtaatttaactattttagttaacaactattttttatgttaaatcaattagtacaccgctatgtttaatacttattcatattttagtttttaggattgagaatcaatacaaaaaattaatgcatcattaattttagaaatacttagtttccacgtagttaatgaaacatttgaactcatcgtacaggacgttctcgtacaggacgtaactataaaccggtttatatttgttcaagatagatacaaatccgataactttttttacgaattctacgggatccactttaaaagtgtcataccgggttctttttattcttttaaacagatcaatggtgtgatgttgattaggtcttttacgaatttgatatagaatagcgttcacatatcctccataatggtcaatcgccatttgttcgtatgtcataaattctttaattatatgacactgtgtattatttagttcatccttgttcatcattaggaatctatccaaaatggcaattatactagaactataggtgcgttgtatacacatattgatgtgtctgtttatacaatccatgatatttggatccatgctactaccttcgggtaaaattgtagcatcatataccatttctagtactttaggttcattattatccattgcagaggacgtcatgatcgaatcctaaaaaaatatattatttttatgttattttgttaaaaataatcatcgaatacttcgtaagatactccttcatgaacataatcagttacaaaacgtttatatgaagtaaagtatctacgatttttacaaaagtccggatgcataagtacaaagtacgcgataaacggaataataatagatttatctagtctatctttttctatagctttcatagttagatacatggtctcagaagtaggattatgtaacatcagcttcgataaaatgactgggttatttagtcttacacattcgctcatacatgtatgaccgttaactacaaagtctacactaaaatgattgaacaatagatagtctaccattgtttcgtattcagatagtacagcgtagtacatagcatcttcacaaattatatcattgtctaatagatatttgacgcatcttatggatcccacttcaacagccatcttaaaatcggtagaatcatattgctttcctttatcattaataatttctaaaacatcatctctatcataaaagatacaaatattaactgtttgatccgtaataacattgctagtcgatagcaatttgttaataagatgcgctgggctcaatgtcttaataagaagtgtaagaggactatctccgaatttgttttgtttattaacatccgttgatggaagtaaaagatctataatgtctacattcttgactgttttagagcatacaatatggagaggtgtatttccatcatgatctggttttgagggactaattcctagtttcatcatccatgagattgtagaagcttttggattgtctgacataagatgtctatgaatatgatttttgccaaatttatccactatcctggcttcgaatccgatggacattatttttttaaacactctttctgaaggatctgtacacgccaacaacggaccacatccttcttcatcaaccgagttgttaatcttggctccatactgtaccaataaatttattctctctatgacttcatcatctgttcccgagagataatatagaggtgttttattatgtttatcacacgcgtttggatctgcgccgtgcgtcagcagcatcgcgactattctattattattaattttagaagctatatgcaatggataatttccatcatcatccgtctcatttggagagtatcctctatgaagaagttcttcgacaaatcgttcatctagtcctttaattccacaatacgcatgtagaatgtgataattatttccagaaggttcgatagcttgtagcatattcctaaatacatctaaatttttactattatatttggcataaagagatagataatactcggccgacataatgttgtccattgtagtataaaaattaatatttctatttctatttctgtatatttgcaacaatttactctctataacaaatatcataacttagttcttttatgtcaagaaggcactggtttagttcatctataaatgtcacgccataactaccacgcatgctatactcagaattatgataaagatatttatccttggggtgtaggtaatggggattaatctttgttggatcagtctctaagttaacacatgtcacacatgatccatttatagttatatcacacgatgatgatttatgaattgattccggaagatcgctatcgtattttgtggttccacaattcatttccatacatgttattgtcacactaatattatgatgaactttatctagccgctgagtggtaaacaacagaacagatagtttattatctttaccaacaccctcagccgctgccacaaatctctgatccgtatccatgatggtcatgtttatttctagtccgtatccagtcaacactatgttagcatttctgtcgatatagctttcactcatatgacactcaccaataatagtagaattaatgtcgtaatttacaccaatagtgagttcggcggcaaagtaccaataccggtaatcttgtcgaggaggacatatagtattcttgtattctaccgaatacccgagagatgcgatacaaaagagtaagactaatttgtaaaccatcttactcaaaatatgtaacaatagtacgatgcaatgagtaagacaataggaaatctatcttatatacacataattattctatcaattttaccaattagttagtgtaatgttaacaaaaatgtgggagaatctaattagtttttctttacacaattgacgtacatgagtctgagttccttgtttttgctaattatttcatccaatttattattcttgactatatcgagatcttttgtataggagtcagacttgtattcaacatgcttttctataatcattttagctatttcggcatcatccaatagtacattttccagattagcagaatagatattaatgtcgtatttgaacagagcctgtaacatctcaatgtctttattatctatagccaatttaatgtccggaatgaagagaagggaattattggtgtttgtcgacgtcatatagtcgagcaagagaatcatcatatccacgtgtccattttttatagtgatgtgaatacaactaaggagaatagccagatcaaaagtagatggtatctctgaaagaaagtaggaaacaatacttacatcattaagcatgacggcatgataaaatgaagttttccatccagttttcccatagaacatcagtctccaatttttcttaacaaacagttttaccgtttgcatgttaccactatcaaccgcataatacaatgcggtgtttcccttgtcatcaaattgtgaatcatccagtccactgaatagcaaaatctttactattttggtatcttccaatgtggctgcctgatgtaatggaaattcattctctagaagatttttcaatgctccagcgttcaacaacgtacatactagacgcacgttattatcagctattgcataatacaaggcactatgtccatggacatccgccttaaatgcatctttgctagagagaaagcttttcagctgcttagacttccaagtattaattcgtgacagatccatgtctgaaacgagacgctaattagtgtatattttttcattttttataattttgtcatattgcaccagaattaataatatctctaatagatctgattagtagatacatggctatcgcaaaacaacatatacacatttaataaaaataatatttattaagaaaattcagatttcacgtacccatcaatataaataaaataatgattccttacaccgtacccatattaaggagattccaccttacccataaacaatataaatccagtaatatcatgtctgatgatgaacacaaatggtgtattaaattccagtttttcaggagatgatctcgccgtagctaccataatagtagatgcctctgctacagttccttgttcgtcgacatctatctttgcattctgaaacattttataaatatataatgggtccctagtcatatgtttaaacgacgcattatctggattaaacatactaggagccatcatttcggctatcgacttaatatccctcttattttcgatagaaaatttagggagtttaagattgtacactttattccctaattgaaacgaccaatagtctaattttgcagccgtaatagaatctgtgaaatgggtcatattatcacctattgccaggtacatactaatattagcatccttatacggaaggcgtaccatatcatattcttcgtcatcgattgtgattgtatttccttgcaatttagtaactacgttcatcatgggaaccgttttcgtaccgtacttattagtaaaactagcattgcgtgttttagtgatatcaaacggatattgccatatacctttaaaatatatagtattaatgattgcccatagagtattattgtcgagcatattagaatctactacattagacataccggatctacgttctactatagaattaattttattaaccgcatctcgtctaaagtttaatctatataggccgaatctatgatattgttgataatacgacggtttaatgcacacagtattatctacgaaactttgataagttagatcagtgtacgtatatttagatgttttcagcttagctaatcctgatattaattctgtaaatgctggacccagatctctttttctcaaatccatagtcttcaataattctattctagtattacctgatgcaggcaatagcgacataaacatagaaaacgaataaccaaacggtgagaagacaatattatcatcttgaatatttttatacgctactataccggcattggtaaatccttgcagacgataggtagacactgaacacgttaacgatagtatcaataacgcaatcatgattttatggtattaataattaaccttatttttatgttcggtataaaaattattgatgtctacacatccttttgtaattgacatctatatatccttttgtataatcaactctaatcactttaacttttacagttttccctaccagtttatccctatattcaacatatctatccatatgcatcttaacactctctgccaagatagcttcaaagtgaggatagtcaaaaagataaatatatagagcataatccttctcgtatactctgccctttattacatcacccgcattgggcaacgaataacaaaatgcaagcatcttgttaacgggctcgtaaattgggataaaaattatgtttttatatctattttattcaagagaatattcaggaatttctttttccggttgtatctcatcgcagtatatatcatttgtacattgtttcatattttttaatagtctacaccttttagtaggactagtatcgtacaattcatagctgtattttgaattccaatcacgcataaaaatatcttccaattgttgacgaagacctaatccatcatccggtgtaatattaatagatgctccacatgtatccgtaaagtaatttcctgtccaatttgaggtacctatatacgccgttttatcggttaccatatatttggcatggtttaccctagaatacggaatgggaggatcagcatctggtacaataaatagctttacttctatatttatgtttttagattttagcatagcgatagatcttaaaaagtttctcatgataaacgaagatcgttgccagcaactaatcaatagcttaactgacacttgtctgtctatagcggctcttcttaattcatcttctatataaggccaaaacaaaatattgcctgccttcgaataaataatagggataaagttcataacagatacataaacgaatttactcgcatttctgatacatgacaataaagcggttaaatcattggttctttccatagtacatagttgttgcggtgcagaagcaataaatacagagtgtggaacgccgcttacgttaatactaagaggatgatctgtattataatacgacggataaaagtttttccaattatatggtagattgttaactccaagataccagtatacctcaaaaatttgagtgagatccgctgccaagttcctattattgaagatcgcaatacccaattctttgacctgagttagtgatctccaatccatgttagcgcttcctaaataaatatgtgtattatcagatatccaaaattttgtatgaagaactcctcctaggatatttgtaatatctatgtatcgtacttcaactccggccatttgtagtctttcaacatcctttaatggtttgttagatttattgacggctactctaactcgtactcctcttttgggtaattgtacaatcttgtttaatattatcgtgccgaaattcgtacccacttcatccgataaactccaataaaaagatgatatatctagtgtttttgtggtattggatagaatttccctccacatgttaaatgtagacaaatatactttatcaaattgcatacctataggaatagtctctgtaatcactgcgattgtattatccggattcattttatttgttaaaagaataatcctatatcacttcactctattaaaaatccaagtttctatttctttcatgactgattttttaacttcatccgtttccttatgaagatgatgtttggcaccttcataaatttttatttctctattacaatttgcatgttgcatgaaataatatgcacctaaaacatcgctaatcttattgtttgttccctggagtatgagagtcggggggtgttaatcttggaaattatttttctaaccttgttggtagccttcaagacctgactagcaaatccagccttaattttttcatgattgattaatgggtcgtattggtatttataaactttatccatatctctagatactgattctggacatagctttccgactggcgcatttagtgtgatggttcccataagtttggcagctagcagattcagttttgaaacagcatctgcattaactagaggagacattagaatcattgctgtaaacaagtttggattatcgtaagaggctagctcccatggaatgacccaataagtagatttaatagttaccacgtgctgtaccaaagtcatcaatcatcattttttcaccattacttcttccatgtccaatatgatcatgtgagaatactaaaattcctaacgatgatatgttttcagctagttcgtcataacgtccagaatgtttaccagctccatgacttatgaatactaatgccttaggatatgtaataggtttccaatatatgtaatcattgtccagattgaacatacagtttgcactcatgattcacgttatataactatcaatattaacagttcgtttgatgatcatattatttttatgttttattgataattgtaaaaacatacaattaaatcaatatagaggaaggagacggctactgtcttttgtgagatagtcatggcgactaaattagattatgaggatgctgttttttactttgtggatgatgataaaatatgtagtcgcgactccatcatcgatctaatagatgaatatattacgtggagaaatcatgttatagtgtttaacaaagatattaccagttgtggaagactgtacaaggaattgatgaagttcgatgatgtcgctatacggtactatggtattgataaaattaatgagattgtcgaagctatgagcgaaggagaccactacatcaattttacaaaagtccatgatcaggaaagtttattcgctaccataggaatatgtgctaaaatcactgaacattggggatacaaaaagatttcagaatctagattccaatcattgggaaacattacagatctgatgaccgacgataatataaacatcttgatactttttctagaaaaaaaattgaattgatgatataggggtcttcataacgcataattattacgttagcattctatatccgtgttaaaaaaaattatcctatcatgtatttgagagttttatatgtagcaaacatgatagctgtgatgccaataagctttagatattcacgcgtgctagtgttagggatggtattatctggtggtgaaatgtccgttatataatctacaaaataatcatcgcatatagtatgcgatagtagagtaaacatttttatcgtttctactgggttcatacatcgtctacccaattcggttataaatgaaattgtcgccaatcttacacccaaccccttgttatccattagtatagtattaacttcgttatttatgtcataaactgtaaatgattttgtagatgccatatcatacatgatattcatgtccctattataatcattactaactttatcacaatatatgttgataatatctatatatgatctagtctttgtgggcaactgtctatacaagtcgtctaaacgttgtttactcatatagtatcgaacagccatcattacatggtcccgttccgttgatagataatcgagtatgttagtggacttgtcaaatctatataccatattttctggaagtggatatacatagtcgtgatcaacattattgctagcctcatcttctatatcctgtactataccattatctatatcatctacataatctacgatattattacacataaacatcgacaacatactattgtttattatctaagtcctgttgatccaaacccttgatctcctctatttgtactatctagagattgtacttcttccagttctggataatatatacgttgatagattagctgagctattctatctccagtatttacattaaacgtacattttccattattaataagaatgactcctatgtttcccctataatcttcgtctattacaccgcctcctatatcaatgccttttagggacagaccagacctaggagctattctaccatagcagaacttaggcatggacatactaatatctgtcttaattaactgtcgttctcctggagggatagtataatcgtaagcgctatataaatcatatccggcggcgtaaggtgattgcctagtaggagatttagctctgttagtttccttaacaaatctaactggtgagttaatattcatgttgaacataaaactaatattttatttcaaaattatttaccatcccatatattccatgaataagtgtgatgattgtacacttctatagtatctatatacgattcacgataaaatcctcctatcaatagcagtttattatccactatgatcaattctggattatccctcggataaataggatcatctatcagagtccatgtattgctggattcacaataaaattccgcatttctaccaaccaagaataaccttctaccgaacactaacgcgcatgatttataatgaggataataagtggatggtccaaactgccactgatcatgattgggtagcaaatattctgtagttgtatcagtttcagaatgtcctcccattacgtatataacattgtttatggatgccactgctggattacatctaggtttcagaagactcggcatattaacccaagcagcatccccgtggaaccaacgctcaacagatgtgggatttggtagacctcctactacgtataatttattgttagcgggtatcccgctagcatacagtctggggctattcatcggaggaattggaatccaattgtttgatatataatttaccgctatagcattgttatgtatttcattgttcatccatccaccgatgagatatactacttctccaacatgagtacttgtacacatatggaatatatctataatttgatccatgttcataggatactctatgaatggatacttgtatgatttgcgtggttgtttatcacaatgaaatattttggtacagtctagtatccattttacattatttatacctctgggagaaagataatttgacctgattacatttttgataaggagtagcagatttcctaatttatttcttcgctttatataccacttaatgacaaaatcaactacataatcctcatctggaacatttagttcatcgctttctagaataagtttcatagatagataatcaaaattgtctatgatgtcatcttccagttccaaaaagtgtttggcaataaagtttttagtatgacataagagattggatagtccgtattctatacccatcatgtaacactcgacacaatattcctttctaaaatctcgtaagataaagtttatacaagtgtagatgataaattctacagaggttaatatagaagcacgtaataaattgacgacgttatgactatctatatatacctttccagtatacgagtaaataactatagaagttaaactgtgaatgtcaaggtctagacaaacccttgtaactggatctttatttttcgtgtatttttgacgtaaatgtgtgcgaaagtaaggagataactttttcaatatcgtagaattgactattatattgccacctatagcatcaataattgttttgaatttcttagtcatagacaatgctaatatattcttacagtacacagtattaacaaatatcggcatttatgtttctttaaaagtcaacatctaaagaaaaatgattatcttcttgagacataactcccattttttggtattcacccacacgtttttcgaaaaaattagtttttccttccaatgatatattttccatgaaatcaaacggattggtaacattataaatttttttaaatcccaattcagaaatcaatctatccgcgacgaattctatatatgttttcatcatttcacaattcattcctataagtttaactggaagagccgcagtaagaaattcttgttcaatggataccgcatctgttataatagatctaacggtttcttcactcggtggatgcaataaatgtttaaacatcaaacatgcgaaatcgcagtgcagaccctcgtctctactaattagttcgttggaaaacgtgagtccgggcattaggccacgctttttaagccaaaatatggaagcgaatgatccagaaaagaagattccttctactgcagcaaaggcaataagtctctctccataaccggcgctgtcatgtatccacttttgagcccaatcggccttcttttttacacaaggcatcgtttctatggcattaaagagatagtttttttcattactatctttaacataagtatcgatcaaaagactatacatttccgaatgaatgttttcaatggccatctgaaatccgtagaaacatctagcctcggtaatctgtacttctgtacaaaatcgttccgccaaattttcattcactattccgtcactggctgcaaaaaacgccaatacatgttttataaaatatttttcgtctggtgttagtttattccaatcattgatatctttagatatatctacttcttccactgtccaaaatgatgcctctgcctttttatacatgttccagatgtcataatattggattgggaaaataacaaatctatttggatttggtgcaaggatgggttccataactaaattaacaataacaataaattttttttcagttatctatatgcctgtacttggatcttttgtacatcgatatcgccgcaatcactacaataattacaagtattattgatagcattgttattagtactatcataattaaattatcgacattcatgggtgctgaataatcgttattatcatcattatcattttgtaattgtgacatcatactagataaatcgtttgcgagattgttgtgggaagcgggcatggaggatgaattatcgttattattatttaacgcctcccattcggattcacaaatgttacgcacattcaacattttatggaaactataattttgtgaaaacagataacaagaaaactcgtcatcgttcaaatttttaacgatagtaaaccgattaaacgtcgagctaatttctaacgctagcgactctgttggatatgggtttccagatatatatcttttcagttcccctacgtatctataatcatctgtaggaaatggaagatatttccatttatctactgttcctaatatcatatgtggtggtgtagtagaaccattaagcgcgaaagatgttatttcgcatcgtattttaacttcgcaataatttctggttagataacgcactctaccagtcaagtcaatgatattagcctttacagatatattcatagtagttgtaacgatgactccatcttttagatgcgatactcctttgtatgtaccagaatcttcgtaccgcaaactcgatatatttaaacaagttaatgagatattaacgcgttttatgaatgatgatatataaccagaagttttatcctcggtggctagcgctataaccttatcattataataccaactagtgtgattaatatgtgacacgttagtgtgggtacaaatatgtacattatcgtctacgtcgtattcgatacatccgcatacagccaacaaatataaaatgacaaatactctaacgccgttcgtacccatcttgatgcggtttaataaatgttttgatttcaatttattgtaaaaaaagattcggttttatactgttcgatattctcattgcttatattttcatctatcatctccacacagtcaaatccgtggttagcatgcacctcatcaaccggtaaaagactatcggactcttctatcattataactctagaatatttaatttggtcattattaatcaagtcaattatcttatttttaacaaacgtgagtattttactcattttttataaaaacttttagaaatatacagactctatcgtgtgtctatatcttctttttatatccaatgtatttatgtctgatttttcttcatttatcatatataatggtccaaattctacacgtgcttcggattcatccagatcattaaggttcttataattgtaacatccttctcttccctcttctacatcttccttcttattcttattcttagcgtcacagaatctaccacagcaggatcccatgacgagcgtcatattaaactaatccattttcaattataatatacgattagtaatgaccattaaaataaaaaatattcttcataaccggcaagaaagtgaaaagttcacattgaaactatgtcagtagtatacatcatgaaatgatgatatatatatactctattttggtggaggattatatgatataattcgtggataatcattcttaagacacatttcttcattcgtaaatcttttcacgttaaatgagtgtccatattttgcaatttcttcatatgatggcggtgtacgtggacgaagctgctcctgttcttgttgtagtcgccgactgtcgtgtttgcgtttagatccctccattatcgcgattgcgtagatggagtactattatataccttgtaattaaatttttttattaattaaacgtataaaaacgttccgtatctgtatttaagagccagatttcgtctaatagaacaaatagctacagtaaaaataactagaataattgctacacccactagaaaccacggatcgtaatacggcaatcggttttcgataataggtggaacgtatattttatttaaggacttaacaattgtctgtaaaccacaatttgcttccgcggatcctgtattaactatctgtaaaagcatatgttgaccgggcggagccgaacattctccgatatctaatttctgtatatctataatattattaacctccgcatacgcattacagttcttttctagcttggataccgcactaggtacatcgtctagatctattcctatttcttcagcgatagctcttctatccttttccggaagcaatgaaatcacttcaataaatgattcaaccatgagtgtgaaactaagtcgagaattactcatgcatttgttagttattcggagcgcgcaatttttaaactgtcctataacctctcctatatgaatagcacaagtgacattagtagggatagaatgttgagctaatttttgtaaataactatctataaaaagattatacaaagttttaaactctttagtttccgccatttatccagtctgagaaaatgtctctcataataaatttttccaagaaactaattgggtgaagaatggaaacctttaatctatatttatcacagtctgttttggtacacatgatgaattcttctaatgctgtactaaattcgatatctttttcgatttctggatatgtttttaataaagtatgaacaaagaaatggaaatcgtaataccagttatgttcaactttgaaattgttttttattttcttgttaatgattccagccacttgggaaaagtcaaagtcgtttaatgccgatttaatacgttcattaaaaacaaactttttatcctttagatgaattattattggttcattggaatcaaaaagtaagatattatcgggtttaagatctgcgtgtaaaaagttgtcgcaacagggtagttcgtagattttaatgtataacagagccatctgtaaaaagataaactttatgtattgtaccaaagatttaaatcctaatttgatagctaactcggtatctactttatctgccgaatacagtgctaggggaaaaattataatatttcctctttcgtattcgtagttagttctcttttcatgttcgaaaaagtgaaacatgcggttaaaatagtttataacattaatattactgttaataactgccggataaaagtgggatagtaatttcacgaatttgatactgtcctttctctcgttaaacgcctttaaaaaaactttagaagaatatctcaatgagagttcctgaccatccatagtttgtatcaataatagcaacatatgaagaacccgtttatacagagtatgtaaaaatgttaatttatagtttaatcccatggcccacgcacacacgattaattttttttcatctccctttagattgttgtatagaaatttgggtactgtgaactccgccgtagtttccatgggactatataattttgtggcctcgaatacaaattttactacatagttatctatcttaaagactataccatatcctcctgtagatatgtgataaaaatcgtcgtttataggataaaatcgtttatccttttgttggaaaaaggatgaattaatgtaatcattctcttctatctttagtagtgtttccttattaaaattcttaaaataatttaacaatctaactgacggagcccaattttggtgtaaatctaattgggacattatgttgttaaaatacaaacagtctcctaatataacagtatctgataatctatggggagacatccattgatattcaggggatgaatcattggcaacacccatttattgtacaaaaagccccaatttacaaacgaaagtccaggtttgatagagacaaacaattaactattttgtctctgtttttaatttctttggtaatgaaattattcacaatatcagtatcttctttatctaccagagattttactaacttgataaccttggctgtctcattcaatagggtagtaatatttgtatgtgtgatattgatatctttttgaattgtttcttttagaagtgattctttgatggtgccagcatacgaattacaataatgcagaaactcagttaacatgcaggaattatagtaagccaattccaattgttgcctgtattgtattagagtattaatatgcgcaatggtgtccttgcgtttctctgatagaatgcgagcagcgattttggcgttatcatttgacgatatttctggaatgacgaatcctgtttctactaactttttggtaggacaaagtgaaacaatcaagaagatagcttctcctcctatttgtggaagaaattgaactcctctagatgatctactgacgatagtatctccttgacagatattggaccgaattacagaagtacctggaatgtaaagccctgaaaccccctcattttttaagcagattgttgccgtaaatcctgcactgtgaccaagatagagagctcctttggtgaatccatctctatgtttcagtttaaccaagaaacagtcagctggtctaaaatttccatctctatctaatacagcatctaacttgatgtcaggaactatgaccggtttaatgttatatgtaacattgagtaaatccttaagttcataatcatcactgtcatcagttatgtacgatccaaacaatgtttctactggcatagtggatacgaagatgctatccatcagaatgtttccctgattagtattttctatatagctattcttctttaaacgattttccaaatcagtaactatgttcatttttttaggagtaggacgcctagccagtatggaagaggattttctagatcctctcttcaacatctttgatctcgatggaatgcaaaaccccatagtgaaacaaccaacgataaaaataatattgtttttcactttttataattttaccatctgactcatggattcattaatatctttataagagctactaacgtataattctttataactgaactgagatatatacaccggatctatggtttccataattgagtaaatgaatgctcggcaataactaatggcaaatgtatagaacaacgaaattatactagagttgttaaagttaatattttctatgagctgttccaataaattatttgttgtaactgcgttcaagtcataaatcatcttgatactatccagtaaaccgtgtttaagttctggaatattatcatcccattgtaaagcccctaattcgactatcgaatatcctgctctgatagcagtttcaatatcgacggacgtcaatactgtaataaaggtggtagtattgtcatcatcgtgataaactacgggaatatggtcgttagtaggtacggtgactttacacaacgcgatatataactttccttttgtaccatttttaacgtagttgggacgtcctgcagggtattgttttgaagaaatgatatcgagaacagatttgatacgatatttgttggattcctgattattcactataatataatctagacagatagatgattcgataaatagagaaggtatatcgttggtaggataatacatccccattccagtattctcggatactctattgatgacactagttaagaacatgtcttctattctagaaaacgaaaacatcctacatggactcattaaaacttctaacgctcctgattgtgtctcgaatgcctcgtacaaggatttcaaggatgccatagattctttgaccaacgatttagaattgcgtttagcatctgatttttttattaaatcgaatggtcggctctctggtttgctaccccaatgataacaatagtcttgtaaagataaaccgcaagaaaatttatacgcatccatccaaataaccctagcaccatcggatgatattaatgtattattatagattttccatccacaattattgggccagtatactgttagcaacggtatatcgaatagattactcatgtaacctactagaatgatagttcgtgtactagtcataatatctttaatccaatctaagaaatttaaaattagattttttacactgttaaagttaacaaaggtattacccggatacgtggatatcatatatggcattggtccattatcagtaatagctccataaactgatacggcgatggtttttatatgtgtttgatctaacgaggaagaaattcgcgcccacaattcatctctagatatgtatttaatatcaaacggtaacacatcaatttcgggacgcgtatatgtttctaaatttttaatccaaatataatgatgacctatatgccctattatcatactgtcaactatagtacacctagagaacttacgatacatctgtttcctataatcgttaaattttacaaatctataacatgctaaaccttttgacgacagccattcattaatttctgatatggaatctgtattctcgataccgtattgttctaaagccagtgctatatctccctgttcgtgggaacgctttcgtataatatcgatcaacggataatctgaagtttttggagaataatatgactcatgatctatttcgtccataaacaatctagacataggaattggaggcgatgatcttaattttgtgcaatgagtcgtcaatcctataacttctaatcttgtaatattcatcatcgacataatactatctatgttatcatcgtatattagtataccacggccttcttcatttcgtgccaaaataatatacagtcttaaataattacgcaatatctcaatagtttcataattgttagctgttttcatcaagatttgtaccctgtttaacatgatggcgttctatacgtctctattttcttttttttaaatttttaacgatttactgtggctagatacccaatctctctcaaatatttttttagcctcgcttacaagctgtttatctatactattaaaactgacgaatccgtgattttggtaatgggttccgtcgaaatttgccgaagtgatatgaacatattcgtcgtcgactatcaacaattttgtattattctgaatagtgaaaaccttcacagatagatcattttgaacacacaacgcgtctagacttctggcggttgccatagaatatacgtcgttcttatcccaattaccaactagaagtctgatcttaactcctctattaatggctgcttctataatggagttgtaaatgtcgggccaatagtagctattaccgtcgacacgtgtagtgggaactatggccaaatgttcaatatctatactagtcttagccgacttgagtttatcaataactacatcggtatctagatctctagaatatcccaataggtgttccggagaatcagtaaagaacactccacctataggattcttaatatgatacgcagtgctaactggcaaacaacaagccgcagagcataaattcaaccatgaattttttgcgctattaaaggctttaaaagtatcaaatcttctacgaagatctgtggccagcgggggataatcagaatatacacctaacgttttaatcgtatgtatagatcctccagtaaatgacgcgtttcctacataacatctttcatcatctgacacccaaaaacaaccgagtagtagtcccacattattttttttatctatattaacggttataaaatttatatccgggcagtgactttgtagctctcccagatttcttttccctcgttcatctagcaaaactattattttaatccctttttcagatgcctcttttagtttatcaaaaataagcgctcccctagtcgtactcagaggattacaacaaaaagatgctatgtatatatatttcttagctagagtgataatttcgttaaaacattcaaatgttgttaaatgatcggatctaaaatccatattttctggtagtgtttctaccagcctacattttgctcccgcaggtaccgatgcaaatggccacatttagttaacataaaaacttatacatcctgttctatcaacgattctagaatatcatcggctatatcgctaaaattttcatcaaagtcgacatcacaacctaactcagtcaatatattaagaagttccatgatgtcatcttcgtctatttctatatccgtatccattgtagattgttgaccgattatcgagtttaaatcattactaatactcaatccttcagaatacaatctgtgtttcattgtaaatttataggcggtgtatttaagttggtagattttcaattatgtatcaatatagcaacagtagttcttgctcctccttgattctagcatcctcttcattattttcttctacgtacataagcatgtccaatacgttagacaacacaccgacgatggcggccgccacagacacgaatatgactagaccgatgaccatttaaaaacccctctctagctttcacttaaactgtatcgattattcttttagaacatgtataatataaaaacattattctatttcgaatttaggcttccaaaaatttttcatccgtaaaccgataataatatatatagacttgttaatagtcggaataaatagattaatgcttaaactatcatcatctccacgattagagatacaatatttacattttttttgctgtttcgaaactttatcaatacacgttaatacaaacccaggaaggagatattgaaactgaggctgttgaaaatgaaacggtgaatacaataattcagataatgtaaaatcatgattccgtattctgatgatattagaactgctaatggatgtcgatggtatgtatctaggagtatctattttaacaaagcatcgatttgctaatatacaattatccttttgattaattgttattttattcatattcttaaaaggtttcatatttatcaattcttctacattaaaaatttccatttttaatttatgtagcccccgcaatactcctcattacgtttcattttttgtctataatatccattttgttcatctcggtacatagattatccaattgagaagcgcatttagtagttttgtacattttaagtttattgacgaatcgtcgaaaactagttatagttaacattttattatttgataccctgatattaatacccctgccgttactattatttataactgatgtaatccacgtaacattagaattaattatcgatagtaatgcatcgacgcttccaaaattgtctattataaactcaccgataatttttttattgcatgttttcatattcattaggattatcaaatctttaatcttactacgattgtatgcgttgatattgcaagacgtcattctaaaagacggaggatctccatcaaatgccagacaatcacgtacaaagtacatggaaataggttttgttctattgcgcatcatagatttatatagaacacccgtagaaatactaatttgttttactctataaaatactaatgcatctatttcatcgttttgtataacgtctttccaagtgtcaaattccaaatttttttcattgatagtaccaaattcttctatctctttaactacttgcatagataggtaattacagtgatgcctacatgccgttttttgaaactgaatagatgcgtctagaagcgatgctacgctagtcacaatcaccactttcatatttagaatatatgtatgtaaaaatatagtagaatttcattttgtttttttctatgctataaatgaattctcattttgcatctgctcatactccgttttatatcaataccaaagaaggaagatatctggttctaaaagccgttaaagtatgcgatgttagaactgtagaatgcgaaggaagtaaagcttcctgcgtactcaaagtagataaaccctcatcgcccgcgtgtgagagaagaccttcgtccccgtccagatgcgagagaatgaataaccctggaaaacaagttccgtttatgaggacggacatgctacaaaatatgttcgcggctaatcgcgacaacgtggcgtcgagacttttgaactaaaatacaattatatccttttcgatattaataaatccgtgtcgtccaggttttttatctctttcagtatgtgaatagataggtattttatctctattcatcatcgaatttaagagatccgataaacattgtttgtattctccagatgtcagcatctgatacaacaatatatgtgcacataaacctctggcacttatttcatgtaccttccccttatcactaaggagaatagtatttgagaaatatgtatacatgatattatcatgaattagatatacagaatttgtaacactctcgaaatcacacgatgtgtcggcgttaagatctaatatatcactcgataacacattttcatctagatacactagacattttttaaagctaaaatagtctttagtagtgacagtaactatgcgattattttcatcgatgatacatttcatcggcatattattacgcttaccatcaaagactataccatgtgtatatctaacgtattctagcatggttgccatacgcgcattaaacttttcaggatctttggatagatcttccaatctatctatttgagaaaacatttttatcatgttcaatagttgaaacgtcggatccactatatagatattatctataaagattttaggaactacgttcatggtatcctggcgaatattaaaactatcaatgatatgattatcgttttcatcttttatcaccatatagtttctaagatatgggattttacttaatataatattatttcccgtgataaattttattagaaaggccaaatctataagaaaagttctagaattagtctgaagaatatctatatcgccgtaccgtatatttggattaattagatatagagaatatgatccgtaacatatacaacttttattatggcgtctaagatattcttccatcaacttattaacatttttgactagggaagatacattatgacgtcccattacttttgccttgtctattactgcgacgttcatagaatttagcatatctcttgccaattcttccattgatgttacattataagaaattttagatgaaattacatttggagctttaatagtaagaactcctaatatgtccgtgtatgtggtcactaatacagattgtagttctataatcgtaaataatttacctatattatatgtttgagtctgtttagaaaagtagctaagtatacgatcttttatttctgatgcagatgtattaacatcggaaaaaaatctttttttattcttttttactaaagatacaaatatgtctttgttaaaaacagttattttttgaatatttctagcttgtaattttaacatatgatattcgttcacactaggtactctgcctaaataggtttctataatctttaatgtaatattaggaagagtattctgatcaggattcctattcattttgaggatttaaaactctgattattgtctaatatggtctctacgcaaactttttcacagagcgatagagtttttgataactcgtttttcttaagaaatataaaactactgtctccagagctcgctctatcttttattttatttaattcgatacaaactcctgatactggttcagaaagtaattcattaattttcagtcctttatagaagatatttaatatagataatacaaaattttcagttcttgatatcgatctgattgatcctagaactagatatattaataacgtgctcattaggcagtttatggcagcttgataattagatatagtatattccagttcatatttattagataccgcattgcccagattttgatattctatgaattcctctgaaaataaatccaaaataactaaacattctattttttgtggattagtgtactctcttccctctatcatgttcactactggtgtccacgatgataaatatctagagggaatataatatagtccataggatgccaatctagcaatgtcgaataactgtaatttgattcttcgttcttcattatgaattgattcttgaggtataaacctaacacaaattatattattagacttttcgtatgtaatgtctttcatgttataagtttttaatcctggaatagaatctattttaatgaggcttttaaacgcagagttctccaacgagtcaaagcataatactctgttgtttttcttatatacgatgttacgattttcttctttgaatggaataggtttttgaattagtttataattacaacataatagataaggaagtgtgcaaatagtacgcggaaaaaacataatagctcccctgttttcatccatggttttaagtaaatgatcactggcttctttagtcaatggatattcgaacattaaccgtttcatcatcattggacagaatccatatttcttaatgtaaagagtgatcaaatcattgtgtttattgtaccatcttgttgtaaatgtgtattcggttatcggatctgctcctttttctattaaagtatcgatgtcgatctcgtctaagaattcaactatatcgacatatttcatttgtatacacataaccattactaacgtagaatgtataggaagagatgtaacgggaacagggtttgttgattcgcaaactattctaatacataattcttctgttaatacgtcttgcacgtaatctattatagatgccaagatatctatataattattttgtaagatgatgttaactatgtgatctatataagtagtgtaataattcatgtatttcgatatatgttccaactctgtctttgtgatgtctagtttcgtaatatctatagcatcctcaaaaaatatattcgcatatattcccaagtcttcagttctatcttctaaaaaatcttcaacgtatggaatataataatctattttacctcttctgatatcattaatgatatagtttttgacactatcttctgtcaattgattcttattcactatatctaagaaacggatagcgtccctaggacgaactactgccattaatatctctattatagcttctggacataattcatctattataccagaattaatgggaactattccgtatctatctaacatagttttaagaaagtcagaatctaagacctgatgttcatatattggttcatacatgaaatgatctctattgatgatagtgactatttcattctctgaaaattggtaactcattctatatatgctttccttgttgatgaaggatagaatatactcaatagaatttgtaccaacaaactgttctcttatgaatcgtatatcatcatctgaaataatcatgtaaggcatacatttaacaattagagacttgtctcctgttatcaatatactattcttgtgataatttatgtgtgaggcaaatttgtccacgttctttaattttgttatagtagatatcaaatccaatggagctacagttcttggcttaaacagatatagtttttctggaacgaattctacaacattattataaaggactttgggtagataagtgggatgaaatcctattttaattaatgcgatagccttgtcctcgtgcagatatccaaacgcttttgtgatagtatggcattcattgtctagaaacgctctacgaatatctgtgacagatatcatctttagagaatatactagtcgcgttaatagtactacaatttgtattttttaatctatctcaataaaaaaattaatatgtatgattcaatgtataactaaactactaactgttattgataactagaatcagaatctaatgatgacgtaaccaagaagtttatctactgccaatttagctgcattatttttagcatctcgtttagattttccatctgccttatcgaatactcttccgtcgatgtctacacaggcataaaatgtaggagagttactaggccccactgattcaatacgaaaagaccaatctctcctagtaatttggcagtactcattaataacggtgacagggttagcacctttccaatcaataatttttttagccggaataacatcatcaaaagacttatgatcctctctcattgatttttcgcgggatacatcatctattatgacgtcagccatagcatcagcatccggcttatccgcctccgttgtcataaaccaacgaggaggaatatcgtcggagctgtacaccatagcactacgttgaagatcgtacagagctttattaacttctcgcttctccatattaagttgtctagttagttgtgcagcagtagctccttcgattccaatggttttaatagcctcacacacaatctctgcgttagaacgctcgtcgatatagattttagacatttttagagagaactaacgcaatcagtaataaaactaatttattttatcattttttttattcatcatcctctggtggttcgtcgtttctatcgaatgtagctctgattaacccgtcatctataggtgatgctggttctggagattctggaggagatggattattatctggaagaatctctgttatttccttgttttcatgtatcgattgcgttgtaacattaagattgcgaaatgctctaaatttgggaggcttaaagtgttgtttgcaatctctacacgcgtgtctaactagtggaggttcgtcagcggctctagtttgaatcatcatcggcgtagtattcctacttttacagttaggacacggtgtattgtatttctcgtcgagaacgttaaaataatcgttgtaactcacatcctttattttatctatattgtattctactcctttcttaatgcattttataccgaataagagatagcgaaggaattctttttcggtgccgctagtacccttaatcatatcacatagtgttttatattccaaatttgtggcaatagacggtttatttctatacgatagtttgtttctggaatcctttgagtattctataccaatattattctttgattcgaatttagtttcttcgatattagattttgtattacctatattcttgatgtagtactttgatgatttttccatggcccattctattaagtcttccaagttggcatcatccacatattgtgatagtaattctcggatatcagtagcggttaccgccattgatgtttgttcattggatgagtaactactaatgtatacattttccatttataacacttatgtattaactttgttcatttatattttttcattattatgttgatattaacaaaagtgaatatatatatgttaataattgtattgtggttatacggctacaattttataattagtgaaagtcagtgtccgatgatcaatgacgatagctttactctgaaaagaaagtatcaaatcgatagtgcggagtcaacaataaaaatggataagaagaggacaaagtttcagaatagagccaaaatggtaaaagaaataaatcagacaataagagcagcacaaactcattacgagacattgaaactaggatacataaaatttaagagaatgattaggactactactctagaagatatagcaccatctattccaaataatcagaaaacttataaactattctcggacatttcagccatcggcaaagcatcacggaatccaagtaagatggtatatgctctgctgctttacatgtttcccaatttgtttggagatgatcatagattcattcgttatagaatgcatccaatgagtaaaatcaaacacaagatcttctctcctttcaaacttaatcttattagaatattagtggaagaaagattctataataatgaatgcagatctaataaatggagaataattggaacacaagttgataaaatgttgatagctgaatctgataaatatacaatagatgcaaggtataacctaaaacccatgtatagaatcaagggaaaatctgaagaagataccctctttatcaaacagatggtagaacaatgtgtgacatcccaggaattggtggaaaaagtgttgaagatactgtttagagatttgttcaagagtggagaatacaaagcgtacagatacgatgatgatgtagaaaatggatttattggattggatacactaaaattaaacattgttcatgatatagttgaaccatgtatgcctgttcgtaggccagtggctaagatactgtgtaaagaaatggtaaataaatactttgagaatccgctacatattattggtaaaaatcttcaagagtgcattgactttgttagtgaataggcatttcatctttctccaatactaattcaaattgttaaattaataatggatagtataaatagttattagtgataaaatagtaaaaataattattagaataagagtgtagtatcatagataactctcttctataaaaatggattttattcgtagaaagtatcttatatacacagtagaaaataatatagattttttaaaggatgatacattaagtaaagtaaacaattttaccctcaatcatgtactagctctcaagtatctagttagcaattttcctcaacatgttattactaaggatgtattagctaataccaatttttttgttttcatacatatggtacgatgttgtaaagtgtacgaagcggttttacgacacgcatttgatgcacccacgttgtacgttaaagcattgactaagaattatttatcgtttagtaacacaatacaatcgtacaaggaaaccgtgcataaactaacacaagatgaaaaatttttagaggttgccaaatacatggacgaattaggagaacttataggcgtaaattatgacttagttcttaatccattatttcacggaggggaacccatcaaagatatggaaatcatttttttaaaactgtttaagaaaacagacttcaaagttgttaaaaaattaagtgttataagattacttatttgggcttacctaagcaagaaagatacaggcatagagtttgcggataatgatagacaagatatatatactctatttcaacaaactggtagaatcgtccatagcaatctaacagaaacgtttagagattatatctttcccggagataagactagctattgggtgtggttaaacgaaagtatagctaatgatgcggatattgttcttaatagacacgccattaccatgtatgataaaattcttagttatatatactctgagataaaacaaggacgcgttaataaaaacatgcttaagttagtttatatctttgagcctgaaaaagatatcagagaacttctgctagaaatcatatatgatattcctggagatatcctatctattattgatgcaaaaaacgacgattggaaaaaatattttattagtttttataaagctaattttattaacggtaatacatttattagtgatagaacgtttaacgaggacttattcagagttgttgttcaaatagatcccgaatatttcgataatgaacgaattatgtctttattctctacgagtgctgcggacattaaacgatttgatgagttagatattaataacagttatatatctaatataatttatgaggtgaacgatatcacattagatacaatggatgatatgaagaagtgtcaaatctttaacgaggatacgtcgtattatgttaaggaatacaatacatacctgtttttgcacgagtcggatcccatggtcatagagaacggaatactaaagaaactgtcatctataaaatccaagagtagacggctgaacttgtttagcaaaaacattttaaaatattatttagacggacaattggctcgtctaggtcttgtgttagatgattataaaggagacttgttagttaaaatgataaaccatcttaagtctgtggaggatgtatccgcattcgttcgattttctacagataaaaaccctagtattcttccatcgctaatcaaaactattttagctagttataatatttccatcatcgtcttatttcaaaggtttttaagagataatctatatcatgtagaagaattcttggataaaagcatccatctaaccaagacggataagaaatatatacttcaattgataagacacggtagatcatagaacagaccaaatatattattaataatttgtatatacatagatataattatcacatattaaaaattcacacatttttgataaatgggaactgctgcaacaattcagactcccaccaaattaatgaataaagaaaatgcagaaatgattttggaaaaaattgttgatcatatagttatgtatattagtgacgaatcaagtgattcagaaaataatcctgaatatattgattttcgtaacagatacgaagactatagatctctcattataaaaagtgatcacgagtttgtaaagctatgtaaaaatcatgcagagaaaagttctccagaaacgcaacaaatgattatcaaacacatatacgaacaatatcttattccagtatctgaagtactattaaaacctataatgtccatgggtgacataattacatataacggatgtaaagacaatgaatggatgctagaacaactctctaccctaaactttaacaatctccgcacatggaactcatgtagcataggcaatgtaacgcgtctgttttatacattttttagttatctgatgaaagataaactaaatatataagtataatcccattctaatactttaacctgatgtattagcatcttattagaatattaacctaactaaaagacataacataaaaactcattacatagttgataaaaagcggtaggatataaatattatggctgccaccgttccgcgttttgacgacgtgtacaaaaatgcacaaagaagaattctagatcaagaaacattttttagtagaggtctaagtagaccgttaatgaaaaacacatatctatttgataattacgcgtatggatggataccagaaactgcaatttggagtagtagatacgcaaacttagatgcaagtgactattatcccatttcgttgggattacttaaaaagttcgagtttctcatgtctctatataaaggtcctattccagtatacgaagaaaaagtaaatactgaattcattgctaatggatcgttctctggtagatacgtatcatatcttcgaaagttttctgctcttccaacaaacgagtttattagttttttgttactgacttccattccaatctataatatcttgttctggtttaaaaatactcagtttgatattactaaacacacattattcagatacgtctatacagataatgccaaacacctggcgttggctaggtatatgcatcaaacaggagactataagcctttgtttagtcgtctcaaagagaattatatatttaccggtcccgttccaataggtatcaaagatataaatcaccctaatcttagtagagcaagaagtccatccgattatgagacattagctaatattagtactatattgtactttaccaagtatgatccggtattaatgtttttattgttttacgtacctgggtattcaattactacaaaaattactccagccgtagaatatctaatggataaactgaatctaacaaagagcgacgtacaactgttgtaaattattttatgcttcgtaaaatgtaggttttgaaccaaacattctttcaaagaatgagatgcataaaactttattatccaatagattgactatttcggacgtcaatcgtttaaagtaaacttcgtaaaatattctttgatcactgccgagtttaaaacttctatcgataattgtttcatatgttttaatatttacaagttttttggtccatggtacattagccggacaaatatatgcaaaataatatcgttctccaagttctatagtttctggattatttttattatattcagtaaccaaatacatattagggttatctgcggatttataatttgagtgatgcattcgactcaacataaataattctagaggagacgatctactatcaaattcggatcgtaaatctgtttctaaagaacggagaatatctatacatacctgattagaattcatccgtccttcagacaacatctcagacagtctggtcttgtatgtcttaatcatattcttatgaaacttggaaacatctcttctagtttcactagtacctttattaattctctcaggtacagattttgaattcgacgatgccgagtatttcatcgttgtatatttcttcttcgattgcataatcagattcttatataccgcctcaaactctattttaaaattattaaacaatactctattattaatcagtcgttctaactcctttgctatttctatggacttatctacatcttgactgtctatctctgtaaacacggagtcggtatctccatacacgctacgaaaacgaaatctgtaatctataggcaacgatgttttcacaatcggattaatatctctatcgtccatataaaatggattacttaatggattggcaaaccgtaacataccgttagataactctgctccatttagtaccgattctagatacaagatcattctacgtcctatggatgtgcaactcttagccgaagcgtatgagtatagagcactatttctaaatcccatcagaccatatactgagttggctactatcttgtacgtatattgcatggaatcatagatggccttttcagttgaactggtagcctgttttaacatctttttatatctggctctctctgccaaaaatgttcttaatagtctaggaatggttccttctatcgatctatcgaaaattgctatttcagagatgaggttcggtagtctaggttcacaatgaaccgtaatatatctaggaggtggatatttctgaagcaagagctgattatttatttcttcttccaatctattggtactaacaacgacaccgactaatgtttccggagatagatttccaaagatacacacattaggatacagactgttataatcaaagattaatacattattactaaacattttttgttttggagcaaataccttaccgccttcataaggaaacttttgttttgtttctgatctaactaagatagttttagtttccaacaatagctttaacagtggacccttgatgactgtactcgctctatattcgaataccatggattgaggaagcacatatgttgacgcacccgcgtctgtttttgtttctactccataatactcccacaaatactgacacaaacaagcatcatgaatacagtatctagccatatctaaagctatgtttagattataatccttatacatctgagctaaatcaacgtcatcctttccgaaagataatttatatgtatcattaggtaaagtaggacataatagtacgactttaaatccattttcccaaatatctttacgaattactttacatataatatcctcatcaacagtcacataattacctgtggttaaaacctttgcaaatgcagcggctttgcctttcgcgtccgtagtatcgtcaccgatgaacgtcatttctctaactcctctatttaatactttacccatgcaactgaacgcgttcttggatatagaatccaatttgtacgaatccaatttttcagatttttgaatgaatgaatatagatcgaaaaatatagttccattattgttattaacgtgaaacgtagtattggccatgccgcctactcccttatgactagactgatttctctcataaatacagagatgtacagcttcctttttgtccggagatctaaagataatcttctctcctgttaataactctagacgattagtaatatatctcagatcaaagttatgtccgttaaaggtaacgacatagtcgaacgttagttccaacaattgtttagctattcgtaacaaaactatttcagaacataaaactagttctcgttcgtaatccatttccattagtgactgtatcctcaaacatcctctatcgacggcttcttgtatttcctgttccgttaacatctcttcattaatgagcgtaaacaataatcgtttaccacttaaatcgatataacagtaacttgtatgcgagattgggttaataaatacagaaggaaacttcttatcgaagtgacactctatatctagaaataagtacgatcttgggatatcgaatctaggtatttttttagcgaaacagttacgtggatcgtcacaatgataacatccattgttaatctttgtcaaatattgctcgtccaacgagtaacatccgtctggagatatcccgttagaaatataaaaccaactaatattgagaaattcatccatggtggcattttgtatgctgcgtttctttggctcttctatcaaccacatatctgcgacggagcattttctatctttaatatctagattataacttattgtctcgtcaatgtctatagttctcatctttcccaacggcctcgcattaaatggaggaggagacaatgactgatatatttcgtccgtcactacgtaataaaagtaatgaggaaatcgtataaatacggtctcaccatttcgacatctggatttcagatataaaaatctgttttcaccgtgactttcaaaccaattaatgcaccgaacatccatttatagaatttagaaatatattttcatttaaatgaatcccaaacattggggaagagccgtatggaccattatttttatagtactttcgcaagcgggtttagacggcaacatagaagcgtgtaaacgaaaactatatactatagttagcactcttccatgtcctgcatgtagacggcacgcgactatcgctatagaggacaataatgtcatgtctagcgatgatctgaattatatttattattttttcatcagattatttaacaatttggcatctgatcccaaatacgcgatcgatgtgacaaaggttaaccctttataaacttaacccattataaaacttatgattagtcacgactgaaataaccgcgtgattattttttggtataattctacacggcatggtttctgtgactatgaattcaacccccgttacattagtgaaatctttaacaaacagcaagggttcgtcaaagacataaaactcattgtttacaatcgaaatagaccccctatcacacttaaaataaaaaatatccttatcctttaccaccaaataaaattctgattggtcaatgtgaatgtattcacttaacagttccacaaatttatttattaactccgaggcacatacatcgtcggtattttttatggcaaactttactcttccagcatccgtttctaaaaaaatattaacgagttccatttatatcatccaatattattgaaatgacgttgatggacaaatgatacaaataagaaggtacggtacctttgtccaccatctcctccaattcatgctctattttgtcattaactttaatgtatgaaaacagtacgccacatgcttccatgacagtgtgtaacactttggatacaaaatgtttgacattagtataattgttcaagactgtcaatctataatagatagtagctataatatattctatgatggtattgaagaagatgacaaccttggcatattgatcatttaacacagacatggtatcaacagatagcttgaatgaaagagaatcagtaattggaataagcgtcttctcgatggagtgtccgtataccaacatgtctgatattttgatgtattccattaaattatttagttttttctttttattctcgttaaacagcatttctgtcaacggaccccaacatcgttgaccgattaagttttgattgatttttccgtgtaaggcgtatctagtcagatcgtatagcctatccaataatccatcgtctgtgtgtagatcacatcgtacactttttaattctctatagaagagcgacagacatctggagcaattacagacagcaatttctttattctctacagatgtaagatacttgaagacattcctatgatgatgcagaattttggataacacggtattgatggtatctgttaccataattcctttgatggctgatagtgtcagagcacaagatttccaatctttgacaatttttagcaccattatctttgttttgatatctatatcagacagcatggtgcgtctgacaacacaaggattaagacggaaagatgaaatgattctctcaacatcttcaatggataccttgctattttttctggcattatctatatgtgcgagaatatcctctagagaatcagtatcctttttgatgatagtggatctcaatgacatgggacgtctaaaccttcttattctatcaccagattgcatggtgatttgtcttctttcttttatcataatgtaatctctaaattcatcggcaaattgtctatatctaaaatcataatatgagatgtttacctctacaaatatctgttcgtccaatgttagagtatttacatcagttttgtattccaaattaaacatggcaacggatttaattttatattcctctattaagtcctcgtcgataataacagaatgtagataatcatttaatccatcgtacatggttggaagatgctcgttgacaaaatctttaattgtcttgatgaaggtgggactatatctaacatcttgattaataaaatttataacattgtccataggatactttgtaactagttttatacacatctcttcatcggtaagtttagacagaatatcgtgaacaggtggtatattatattcatcagatatacgaagaacaatgtccaaatctatattgtttaatatattatatagatgtagtgtagctcctacaggaatatctttaactaagtcaatgatttcatcaaccgttagatctattttaaagttaatcatataggcattgatttttaaaaggtatgtagccttgactacattctcattaattaaccattccaagtcactgtgtgtaagaagattatattctatcataagcttgactacatttggtcccgataccattaaagaattcttatgatataaggaaacagattttaggtactcatctactctacaagaattttggagagccttaacgatatcagtgacgtttattatttcaggaggaaaaaacctaacattgagaatatcggaattaatagcttccagatacagtgattttggcaatagtccgtgtaatccataatccagtaacacgagctggtgcttgctagacaccttttcaatgtttaatttttttgaaataagctttgataaagccttcctcgcaaattccggatacatgaacatgtcggcgacatgattaagtattgttttttcattatttttatattttctcaacaagttctcaataccccaatagatgatagaatatcacccaatgcgtccatgttgtctatttccaacaggtcgctatatccaccaatagaagttttcccaaaaaagattctaggaacagttctaccaccagtaatttgttcaaaatagtcacgcaattcattttcgggtttaaattctttaatatcgacaatttcatacgctcctcttttgaaactaaacttatttagaatatccagtgcatttctacaaaaaggacatgtatacttgacaaaaattgtcactttgttattggccaacctttgttgtacaaattcctcggccattttaatatttaagtgatataaaactatctcgacttatttaactctttagtcgagatatatggacgcagatagctatatgatagccaactacagaaggcaaacgctataaaaaacataattacgacgagcatatttataaatatttttattcagcattacttgatatagtaatattaggcacagtcaaacattcaaccactctcgatacattaactctctcattttctttaacaaattctgcaatatcttcgtaaaaagattcttgaaactttttagaatatctatcgactctagatgaaatagcgttcgtcaacatactatgttttgtatacataaaggcgcccattttaacagtttctagtgacaaaatgctagcgatcctaggatcctttagaatcacatagattgacgattcgtctctcttagtaactctagtaaaataatcatacaatctagtacgcgaaataatattatccttgacttgaggagatctaaacaatctagttttgagaacatcgataagttcatcgggaatgacatacatactatctttaatagaactcttttcatccagttgaatggattcgtccttaaccaactgattaatgagatcttctattttatcattttccagatgatatgtatgtccattaaagttaaattgtgtagcgcttctttttagtctagcagccaatactttaacatcactaatatcgatatacaaaggagatgatttatctatggtattaagaattcgtttttcgacatctgtcaaaaccaattcctttttgcctgtatcatccagttttccatcctttgtaaagaaattattttctactagactattaataagactgataaggattcctccataattgcacaatccaaactttttcacaaaactagactttacaagatctacaggaatgcgtacttcaggtttcttagcttgtgattttttcttttgtggacattttcttgtgaccaactcatctaccatttcattgattttagcagtgaaataagctttcaatgcacgggcactgatactattgaaaacgagttgatcttcaaattccgccatttaagttcaccaaacaacttttaaatacaaatatatcaatagtagtagaataagaactataaaaaaaataataattaaccaataccaaccccaacaaccggtattattagttgatgtgactgttttctcatcacttagaacagatttaacaatttctataaagtctgtcaaatcatcttccggagaccccataaatacaccaaatatagcggcgtacaacttatccatttatacattgaatattggcttttctttatcgctatcttcatcatattcatcatcaatatcaacaagtcccagattacgagccagatcttcttctacattttcagtcattgatacacgttcactatctccagagagtccgataacgttagccaccacttctctatcaatgattagtttcttgagtgcgaatgtaatttttgtttccgttccggatctatagaaaactacaggtgtgataattgccttggccaattgtctttctcttttactgagtgattctagttcaccttctatagatctgagaatggatgattctccagtcgaaacatattctaccatggctccgtttaatttgttgatgaagatggattcatccttaaatgttttctctgtaatagtttccaccgaaagactatgcaaagaatttggaatgcgttccttgtgcttaatgtttccatagacggcttctagaagttgatacaacataggactagccgcggtaacttttatttttagaaagtatccatcgcttctatcttgtttagatttatttttataaagtttagtctctccttccaacataataaaagtggaagtcatttgactagataaactatcagtaagttttatagagatagacgaacaattagcgtattgagaagcatttagtgtaacgtattcgatacattttgcattagatttactaatcgattttgcatactctataacacccgcacaagtctgtagagaatcgctagatgcagtaggtcttggtgaagtttcaactctcttcttgattaccttactcatgattaaacctaaataattgtactttgtaatataatgatatatattttcactttatctcatttgagaataaaaatgtttttgtttaaccactgcatgatgtacagatttcggaatcacaaaccaccggtggttttattttatccttgtccaatgtgaattgaatgggagcggatgcgggtttcgtacgtagatagtacattcccgtttttagaccgagactccatccgtaaaaatgcatactcgttagtttggaataactcggatctgctatatggatattcatagattgactttgatcgatgaaggctcccctgtctgcagccatttttatgatcgtcttttgtggaatttcccaaatagttttataaactcgcttaatatcttctggaaggtttgtattctgaatggatccaccatctgccataatcctattcttgatctcatcattccataattttctctcggttaaaactctaaggagatgcggattaactacttgaaattctccagacaatactctccgagtgtaaatattactggtatacggttccaccgactcattatttcccaaaatttgagcagttgatgcagtcggcataggtgccaccaataaactatttctaagaccgtatgttctgattttatcttttagaggttcccaattccaaagatccgacggtacaacattccaaagatcatattgtagaataccgttactggcgtacgatcctacatatgtatcgtatggtccttccttctcagctagttcacaactcgcctctaatgcaccgtaataaatggtttcgaagatcttcttatttagatcttgtgcttccaggctatcaaatggataatttaagagaataaacgcgtccgctaatccttgaacaccaataccgataggtctatgtctcttattagagatttcagcttctggaataggataataattaatatctataattttattgagatttctgacaattactttgaccacatccttcagtttgagaaaatcaaatcgcccatctattacaaacatgttcaaggcaacagatgccagattacaaacggctacctcattagcatccgcatattgtattatctcagtgcaaagattactacacttgatagttcctaaattttgttgattactctttttgttacacgcatccttataaagaatgaatggagtaccagtttcaatctgagattctataatcgctttccagacgactcgagcctttattatagatttgtatctcctttctctttcgtatagtgtatacaatcgttcgaactcgtctccccaaacattgtccaatccaggacattcatccggacacatcaacgaccactctccgtcatccttcactcgtttcataaagagatcaggaatccaaagagctataaatagatctctggttctatgttcctcgtttcctgtattctttttaagatcgaggaacgccataatatcagaatgccacggttccaagtatatggccataactccaggccgtttgtttcctccctgatctatgtatctagcggtgttattataaactctcaacattggaataataccgtttgatataccattggtaccggagatatagcttccactggcacgaatattactaattgatagacctattccccctgccattttagagattaatgcgcatcgttttaacgtgtcatagataccctctatgctatcatcgatcatgttaagtagaaaacagctagacatttggtgacgactagttcccgcattaaataaggtaggagaagcgtgcgtaaaccatttttcagaaagtagattgtacgtctcaatagctgagtctatatcccattgatgaattcctactgcgacacgcattaacatgtgctgaggtctttcaacgatcttgttgtttattttcaacaagtaggatttttccaaagttttaaaaccaaaatagttgtatgaaaagtctcgttcgtaaataataaccgagttgagtttatccttatatttgttaactatatccatggtgatacttgaaataatcggagaatgtttcccatttttaggattaacatagttgaataaatcctccatcacttcactaaatagtttttttgtttccttgtgtagatttgatacggctattctggcggctagaatggcataatccggatgttgtgtagtacaagtggctgctatttcggctgccagagtgtccaattctaccgttgttactccattatatattccttgaataaccttcatagctattttaataggatctatatgatccgtgtttaagccataacataattttctaatacgagacgtgattttatcaaacatgacattttccttgtatccatttcgtttaatgacaaacatttttgttggtgtaataaaaaaattatttaacttttcattaatagggatttgacgtacgtagcgtacaaaatgattgttcctggtatatagataaagagtcctatatatttgaaaatcgttacggctcgattaaactttaatgattgcatagtgaatatatcattaggatttaactccttgactatcagggcggcaccagaaattaccatcaaaagcattaatacagttatgcctatcgcagttagaacggttatagcatccaccatttatatctaaaaattagatcaaagaatatgtgacaaagtcctagttgtatattgagaattgacaaaacaatgtttcttacatattttttttttattagtaaccgacttaatagtaggaactggaaaactagacttgattattctataagtatagatacccttccaaataatattctctttgataaaagttccagaaaatgtagaattttttaaaaagttatcttttgctattaccaagattgtgtttagacgcttattattaatatgagtgatgaaatccacaccgcctctagatatcgcctttatttccacattagatggtaaatccaatagtgaaactatctttttaggaatgtatggactcgcgtttagaggagtgaacgtcttgggcgtcggaaaggatgattcgtcaaacgaataaacaatttcacaaatggatgttaatgtattagtaggaaattttttgacgctagtggaattgaaaattctaatggatgatgttctacctatttcatccgataacatgttaatttccgacaccaacggttttaatatttcgatgatatacggtagtctctctttcggacttatatagcttattccacaatacgagtcattatatactccaaaaaacaaaataactagtataaaatctgtatcgaatgggaaaaacgaaattatcgacataggtatagaatccggaacattgaacgtattaatacttaattctttttctgtggtaagtaccgataggttattgacattgtatggttttaaatattctataacttgagacttgatagatattagtgatgaattgaaaattatttttatcaccacgtgtgtttcaggatcatcgtcgacgcccgtcaaccaaccgaacggagtaaaataaatatcattaatatatgctctagatattagtatttttatcaatcctttgattatcatcttctcgtaggcgaatgattccatgatcaagagtgatttaagaacatcctccggagtattaatgggcttagtaaacagtccatcgttgcaataataaaagttatccaagttaaaggatattatgcattcgtttaaagatatcacctcatctgacggagacaattttttggtaggttttagagactttgaagctacttgtttaacaaagttattcatcgtcgtttactattctatttaattttgtagttaatttatcacatatcacattaattgactttttggtccatttttccatacgtttatattcttttaatcctgcgttatccgtttccgttatatccagtgatagatcgtgcaggttaaatagaatgctcttaaataatgtcatttttttatccgctaaaaatttaaagaatgtataaacttttttcaaagatttaaaacttttaggtggtgtcctagtacacaatatcataaacaaactaataaacatcccgcattcagattccaacagctgattaacttccacattaatacagcctattttcgctccaaatgtacattcgaaaaatctgaataaaacatcaatgtcgcaatttgtattatccaatacagaatgtttgtgattcgtgttaaaaccatcggagaaggaatagaaataaaaattattatagtggtggaattcagttggaatattgcctccggagtcataaaaggatactaaacattgttttttatcataaattacacatttccaatgagacaaataacaaaatccaaacattacaaatctagaggtagaacttttaattttgtctttaagtatatacgataagatatgtttattcataaacgcgtcaaatttttcatgaatcgctaaggagtttaagaatctcatgtcaaattgtcctatataatccacttcggatccataagcaaactgagagactaagttcttaatacttcgattgctcatccaggctcctctctcaggctctattttcatcttgacgacctttggattttcaccagtatgtattcctttacgtgataaatcatcgattttcaaatccatttgtgagaagtctatcgccttagatactttttcccgtagtcgaggtttaaagaaatacgctaacggtatactagtaggtaactcaaaaacatcatatatagaatggtaacgcgtctttaactcgtcggttaactctttcttttgatcgagttcgtcgctactattgggtctgctcaggtgccccgactctactagttccaacatcataccgataggaatacaagacactttgccggcggttgtagatttatcatatttttccactacatatccgttacaatttgttaaaaatttagatacatctatattgctacataatccagctagtgaatatatatgacataataaattggtaaatcctagttctggtattttactaattactaaatctgtatatctttccatttatcatggaaaagaatttaccagatatcttcttttttccaaactgcgttaatgtattctcttacaaatattcacaagatgaattcagtaatatgagtaaaacggaacgtgatagtttctcattggccgtgtttccagttataaaacatagatggcataacgcacacgttgtaaaacataaaggaatatacaaagttagtacagaagcacgtggaaaaaaagtatctcctccatcactaggaaaacccgcacacataaacctaaccgcgaagcaatatatatacagtgaacacacaataagctttgaatgttatagttttctaaaatgtataacaaatacagaaatcaattcgttcgatgagtatatattaagaggactattagaagctggtaatagtttacagatattttccaattccgtaggtaaacgaacagatactataggtgtactagggaataagtatccatttagcaaaattccattggcctcattaactcctaaagcacaacgagagatattttcagcgtggatttctcatagacctgtagttttaactggaggaactggagtgggtaagacgtcacaggtacccaagttattgctttggtttaattatttatttggtggattctctactctagataaaatcactaactttcacgaaagaccagtcattctatctcttcctaggatagctttagttagattgcatagcaataccattttaaaatcattgggatttaaggtactagatggatctcctatttctttacggtacggatctataccggaagaattaataaacaaacaaccaaaaaaatatggaattgtattttctacccataagttatctctaacaaaactatttagttatggcactcttattatagacgaagttcatgagcatgatcaaataggagatattattatagcagtagcgagaaagcatcatacgaaaatagattctatgtttttaatgactgccacgttagaggatgaccgagaacggctaaaagtatttttacctaatcccgcatttatacatattcctggagatacactgtttaaaattagcgaggtatttattcataataagataaatccatcttccagaatggcatacatagaagaagaaaagagaaatttagttactgctatacagatgtatactcctcctgatggatcatccggtatagtctttgtggcatccgttgcacagtgtcacgaatataaatcatatttagaaaaaagattaccgtatgatatgtatattattcatggtaaggtcttagatatagacgaaatattagaaaaagtgtattcatcacctaatgtatcgataattatttctactccttatttggaatccagcgttactatacgcaatgttacacacatttatgatatgggtaaagtttttgtccccgctccttttggaggatcgcaagaatttatttctaaatctatgagagatcaacgaaaaggaagagtaggaagagttaatcctggtacatacgtctatttctatgatctgtcttatatgaagtctatacagcgaatagattcagaatttctacataattatatattgtacgctaataagtttaatctaacactccccgaagatttgtttataatccctacaaatttggatattctatggcgtacaaaggaatatatagactcgttcgatattagtacagaaacatggaataaattattatccaattattatatgaagatgatagagtatgctaaactttatgtactaagtcctattctcgctgaggagttggataactttgagaggacgggagaattaactagtattgtacgagaagccattttatctctaaatttacgaattaagattttaaattttaaacataaagatgatgatacgtatatacacttttgtaaaatattattcggtgtctataacggaacaaacgctactatatattatcatagacctctaacgggatatatgaatatgatttcagatactatatttgttcctgtagataataactaaaaatcaaactctaatgaccacatctttttttagagatgaaaaattttctacatctccttttgtagacacgactaaacattttgcaaaaaaaagtttattagtgtttagataatcgtatacttcatcagtgtagatagtaaatgtgaacaaataaaaggtattcttactcaatagattggtaaattccatagaatatattaatcctttcttcttgagatcccacatcatttcaaccagagacgttttatccaatgatttacctcgtactataccacatacaaaactagattttgcagtgacgtcgtacctggtattcctaccaaacaaaattttacttttagttcttttagaaaattctaaggtagaatctctatttgccaatatgtcatctatggaattaccactagcaaaaaatgatagaaatatatattgatacatcgcagctggttttgatctactatactttaaaaacgaatcagattccataattgcctgtatatcatcagctgaaaaactatgttttacacgtattccttcggcatttctttttaatgatatatcttgtttagacaatgataaagttatcatgtccatgagagacgcgtctccgtatcgtataaatatttcattagatgttagacgcttcattaggggtatacttctataaggtttcttaatcagtccatcattggttgcgtcaagaactactatcggatgttgttgggtatctctagtgttacacatggccttactaaagtttgggtaaataactatgatatctctattaattatagatgcatatatttcattcgtcaaggatattagtatcgacttgctatcgtcattaatacgtgtaatgtaatcatataaatcatgcgatagccaaggaaaattcaaatagatgttcatcatataatcgtcgctataattcatattaatacgttgacattgactaatttgtaatatagcctcgccacgaagaaagctctcgtattcagtttcatcgataaaggataccgttaaatataactggttgccgatagtctcatagtctattaagtggtaagtttcgtacaaatacagaatccctaaaatattatctaatgttggattaatctttaccataactgtataaaatggagacggagtcataactattttaccgtttgtacttactggaatagacgaaggaataatctccggacatgctggtaaagacccaaatgtctgtttgaagaaatccaatgttccaggtcctaatctcttaacaaaaattacgatattcgatcccgatatcctttgcattctatttaccagcatatcacgaactatattaagattatctatcatgtctattctcccaccgttatataaatcgcctccgctaagaaacgttagtatatccatacaatggaatacttcatttctaaaatagtattcgttttctaattctttaatgtgaaatcgtatactagaaagggaaaaattatctttgagttttccgttagaaaagaaccacgaaactaatgttctgattgcgtccgattccgttgctgaattaatggatttacaccaaaaactcatataacttctagatgtagaagcattcgctaaaaaattagtagaatcaaaggatataagtagatgttccaacaagtgagcaattcccaagatttcatctatatcattctcgaatccgaaattagaaattcccaagtagatatcctttttcatccgatcgttgatgaaaatacgaactttattcggtaagacaatcatttactaaggagtaaaataggaagtaatgttcgtatgtcgttatcatcgtataaattaaaggtgtgttttttaccattaagtgacattataattttaccaatattggaattataatataggtgtatttgcgcactcgcgacggttgatgcatcggtaaatatagctgtatctaatgttctagtcggtatttcatcatttcgctgtctaataatagcgttttctctatctgtttccattacagctgcctgaagtttattggtcggataatatgtaaaataataagaaatacatacgaataacaaaaataaaataagatataataaagatgccatttagagatctaattttgttcaacttgtccaaattcctacttacagaagatgaggaatcgttggagatagtgtcttccttatgtagaggatttgaaatatcttatgatgacttgataacttactttccagataggaaataccataaatatatttctaaagtatttgaacatgtagatttatcggaggaattaagtatggaattccatgatacaactttgcgagatttagtctatcttagattgtacaagtattccaagtgtatacggccgtgttataaattaggagataatctaaaaggcatagttgttataaaggacaggaatatttatattagggaagcaaatgatgacttgatagaatatctcctcaaggaatacactcctcagatttatacatattctaatgagcgcgtccccataactggttcaaaattaattctttgtggattttctcaagttacatttatggcgtatacaacgtcgcatataacaacaaataaaaaggtagatgttctcgtttccaaaaaatgtatagatgaactagtcgatccaataaattatcaaatacttcaaaatttatttgataaaggaagcggaacaataaacaaaatactcaggaagatattttattcggtaacaggtggccaaactccataggtagctttttctatttcggattttagaatttccaaattcaccagcgatttatctgttttggtgaaatccaaggatttattaatgtccacaaatgccatttgttttgtctgtggattgtatttgaaaatggaaacgatgtagttagatagatgcgctgcgaagtttcctattagggttccgcgcttcacgtcacccagcatacttgaatcaccatcctttaaaaaaaatgataagatatcaacatggagtatatcatactcggattttaattcttctactgcatcactgacattttcacaaatactacaatacggtttaccgaaaataatcagtacgttcttcatttatgggtatcaaaaacttaaaatcgttactgctggaaaataaatcactgacgatattagatgataatttatacaaagtatacaatggaatatttgtggatacaatgagtatttatatagccgtcgccaattgtgtcagaaacttagaagagttaactacggtattcataaaatacgtaaacggatgggtaaaaaagggagggcatgtaaccctttttatcgatagaggaagtataaaaattaaacaagacgttagagacaagagacgtaaatattctaaattaaccaaggacagaaaaatgctagaattagaaaagtgtacatccgaaatacaaaatgttaccggatttatggaagaagaaataaaggcagaaatgcaattaaaaatcgataaactcacatttcaaatatatttatctgattctgataacataaaaatatcattgaatgagatactaacacatttcaacaataatgagaatgttacattattttattgtgatgaacgagacgcagaattcgttatgtgtctcgaggctaaaacacatttctctaccacaggagaatggccgttgataataagtaccgatcaggatactatgctatttgcatctgctgataatcatcctaagatgataaaaaacttaactcaactgtttaaatatgttccatctgcagaggataactatttagcaaaattaacggcgttagtgaatggatgtgatttctttcctggactctatggggcatctataacacccaacaacttaaacaaaatacaattgtttagtgattttacaatcgataatatagtcactagtttggcaattaaaaattattatagaaagactaactctaccgtagacgtgcgtaatattgttacgtttataaacgattacgctaatttagacgatgtctactcgtatattcctccttgtcaatgcactgttcaagaatttatattttccgcattagatgaaaaatggaatgaatttaaatcatcttatttagaaagcgtgccgttaccctgccaattaatgtatgcgttagaaccacgcaaggagattgatgtttcagaagttaaaactttatcatcttatatagatttcgaaaatactaaatcagatatcgatgttataaaatctatatcctcgatcttcggatattctaacgaaaactgtaacacgatagtattcggcatctataaggataatttactactgagtataaatagttcattttactttaacgatagtctgttaataaccaatactaaaagtgataatataataaatataggttactagattaaaaatggtgttccaactcgtgtgctctacgtgcggcaaagatatttctcacgaacgatataaattgattatacgaaaaaaatcattaaaggatgtactcgtcagtgtaaagaacgaatgttgtaggttaaaattatctacacaaatagaacctcaacgtaacttaacagtgcaacctctattggatataaactaatatggatccggttaattttatcaagacatatgcgcctagaggttctattatttttattaattataccatgtcattaacaagtcatttgaatccatcgatagaaaaacatgtgggtatttattatggtacgttattatcggaacacttggtagttgaatcaacatatagaaaaggagttcgaatagtcccattggatagtttttttgaaggatatcttagtgcaaaagtatacatgttagagaatattcaagttatgaaaatagcagctgatacgtcattaactttattgggtattccgtatggatttggtcatgatagaatgtattgttttaaattggtagctgactgttataaaaatgccggtattgatacatcgtctaaacgaatattaggtaaagatatttttctgagccaaaacttcacagacgataatagatggataaagatatatgattctaataatttaacattttggcaaattgattaccttaaagggtgagttaatatgcataactactcctccgttgttttttccctcgttctttttcttaacgttgtttgccatcactctcataatgtaaagatattctaaaatggtaaacttttgcatatcggacgcagaaattggtataaatgttgtaattgtattatttcccgtcaatggactagtcacagctccatcagttttatatcctttagagtatttctcactcgtgtctaacattctagagcattccatgatctgtttatcgttgatattggccggaaagatagattttttattttttattatattactattggcaattgtagatataacttctggtaaatatttttctaccttttcaatctcttctattttcaagccggctatatattctgctatattgttgctagtatcaataccttttctggctaagaagtcatatgtggtattcactatatcagttttaactggtagttccattagcctttccacttctgcagaataatcagaaattggttctttaccagaaaatccagctactataataggctcaccgatgatcattggcaaaatcctatattgtaccagattaatgagagcatatttcatttccaataattctgctagttcttgagacattgatttatttgatgaatctagttggttctctagatactctaccatttctgccgcatacaataacttgttagataaaatcagggttatcaaagtgtttagcgtggctagaatagtgggcttgcatgtattaaagaatgcggtagtatgagtaaaccgttttaacgaattatatagtctccagaaatctgtggcgttacatacatgagccgaatgacatcgaagattgtccaatatttttaatagctgctctttgtccattatttctatatttgactcgcaacaattgtagataccattaatcaccgattcctttttcgatgccggacaatagcacaattgtttagctttggactctatgtattcagaattaatagatatatctcttaatacagattgcactatacattttgaaactatgtcaaaaattgtagaacgacgctgttctgcagccatttaactttaaataatttacaaaaatttaaaatgagcatccgtataaaaatcgataaactgcgccaaattgtggcatatttttcagagttcagtgaagaagtatctataaatgtagactcgacggatgagttaatgtatatttttgccgccttgggcggatctgtaaacatttgggccattatacctctcagtgcatcagtgttctaccgcggagccgaaaatattgtgtttaatcttcctgtgtccaaggtaaaatcgtgtttgtgtagttttcacaatgatgccatcatagatatagaacctgatctggaaaataatctagtaaaactttctagttatcatgtagtaagtgtcgattgtaataaggaactgatgcctattaggacagatactactatttgtctaagtatagatcaaaagaaatcttacgtgtttaattttcacaagtatgaagaaaaatgttgtggtagaaccgtcattcatttagaatggttgttgggctttatcaagtgtattagtcagcatcagcatttggctattatgtttaaagatgacaatattattatgaagactcctggtaatactgatgcattttccagggaatattctatgactgaatgttctcaagaactacaaaagttttctttcaaaatagctatctcgtctctcaacaaactacgaggattcaaaaagagagtcaatgtttttgaaactagaatcgtaatggataatgacgataacattttaggaatgttgttttcggatagagttcaatcctttaagatcaacatctttatggcgtttttagattaatactttcaatgagataaatatgggtggcggagtaagtgttgagctccctaaacgggatccgcctccgggagtacccactgatgagatgttattaaacgtggataaaatgcatgacgtgatagctcccgctaagcttttagaatatgtgcatataggaccactagcaaaagataaagaggataaagtaaagaaaagatatccagagtttagattagtcaacacaggacccggtggtctttcggcattgttaagacaatcgtataatggaaccgcacccaattgctgtcgcacttttaatcgtactcattattggaagaaggatggaaagatatcagataagtatgaagagggtgcagtattagaatcgtgttggccagacgttcacgacaccggaaaatgcgatgttgatttattcgactggtgtcagggggatacgttcgatagaaacatatgccatcagtggatcggttcagcctttaataggagtaatagaactgtagagggtcaacaatcgttaataaatctgtataataagatgcaaacattatgtagtaaagatgctagtgtaccaatatgtgaatcatttttgcatcatttacgcgcacacaatacagaagatagcaaagagatgatcgattatattctaagacaacagtctgcggactttaaacagaaatatatgagatgtagttatcccactagagataagttagaagagtcattaaaatatgcggaacctcgagaatgttgggatccagagtgttcgaatgccaatgttaatttcttgctaacacgtaattataataatttaggactttgcaatattgtacgatgtaatactagcgtgaacaacttacagatggataaaacttcctcattaagattgtcatgtggattaagcaatagtgatagattttctactgttcccgtcaatagagcaaaagtagttcaacataatattaaacactcgttcgacctaaaattgcatttgatcagtttattatctctcttggtaatatggatactaattgtagctatttaaatgggtgccgcggcaagcatacagacgacggtgaatacactcagcgaacgtatctcgtctaaattagaacaagaagcgaatgctagtgctcaaacaaaatgtgatatagaaatcggaaatttttatatccgacaaaaccatggatgtaacctcactgttaaaaatatgtgctctgcggacgcggatgctcagttggatgctgtgttatcagccgctacagaaacatatagtggattaacaccggaacaaaaagcatacgtgccagctatgtttactgctgcgttaaacattcagacgagtgtaaacactgttgttagagattttgaaaattatgtgaaacagacttgtaattctagcgcggtcgtcgataacaaattaaagatacaaaacgtaatcatagatgaatgttacggagccccaggatctccaacaaatttggaatttattaatacaggatctagcaaaggaaattgtgccattaaggcgttgatgcaattgacgactaaggccactactcaaatagcacctaaacaagttgctggtacaggagttcagttttatatgattgttatcggtgttataatattggcagcgttgtttatgtactatgccaagcgtatgttgttcacatccaccaatgataaaatcaaacttattttagccaataaggaaaacgtccattggactacttacatggacacattctttagaacttctccgatggttattgctaccacggatatgcaaaactgaaaatatattgataatattttaatagattaacatggaagttatcactgatcgtctagacgatatagtgaaacaaaatatagcggatgaaaaatttgtagattttgttatacacggtctagagcatcaatgtcctgctatacttcgaccattaattaggttgtttattgatatactattatttgttatagtaatttatatttttacggtacgtctagtaagtagaaattatcaaatgttgttggcgttggtggcgctagtcatcacattaactattttttattactttatactataatagtactagactgacttctaacaaacatctcacctgccataaataaatgcttgatattaaagtcttctatttctaacactattccatctgtggaaaataatactctgacattatcgctaattgacacatcggtgagtgatatgcctataaagtaataatcttctttgggcacatataccagtgtaccaggttctaacaacctatttactggtgctcctatagcatactttttctttaccttgagaatatccatcgtttgcttggtcaatagcgatatgtgattttttatcaaccactcgaaaaagtaattggagtgttcatatcctctacgggctattgtctcatggccgtgtatgaaatttaagtaacacgactgtggtagatttgttctatagagccggttgccgcaaatagatagaactaccaatatgtctgtacaaatgttaaacattaattgattaacagaaaaaacaatgttcgttctgggaatagaaaccagatcaaaacaaaattcgttagaatatatgccacgtttatacattgaatataaaataactacagtttgaaaaataacagtatcatttaaacatttaacttgcggggttaatctcacaactttactgtttttgaactgttcaaaatatagcatagatccgtgagaaatacgtttagccgcctttaatagaggaaatcccaccgcctttctggatctcaccaacgacgatagttctgaccagcaactcatttcttcatcatccacctgttttaacatataataggcaggagatagatatccgtcattgcaatattccttctcgtaggcacacaatctaatattgataaaatctccattctcttctctgcatttattatcttgtttcggtggctgattaggctgtagtcttggtttaggctttggtatatcgttgttgaatctattttggtcattaaatctttcatttcttcctggtatatttttatcacctcgtttggttggatttttgtctatattatcgtttgtaacatcggtacgggtattcatttatcacaaaaaaaacttctctaaatgagtctactgctagaaaacctcatcgaagaagataccatattttttgcaggaagtatatctgagtatgatgatttacaaatggttattgccggcgcaaaatccaaatttccaagatctatgctttctatttttaatatagtacctagaacgatgtcaaaatatgagttggagttgattcataacgaaaatatcacaggagcaatgtttaccacaatgtataatataagaaacaatttgggtctaggagatgataaactaactattgaagccattgaaaactatttcttggatcctaacaatgaagttatgcctcttattattaataatacggatatgactgccgtcattcctaaaaaaagtggtaggagaaagaataagaacatggttatcttccgtcaaggatcatcacctatcttgtgtattttcgaaactcgtaaaaagattaatatttataaagaaaatatggaatccgcgtcgactgagtatacacctatcggagacaacaaggctttgatatctaaatatgcgggaattaatatcctaaatgtgtattctccttccacatccataagattgaatgccatttacggattcaccaataaaaataaactagagaaacttagtactaataaggaactagaatcgtatagttctagccctcttcaagaacccattaggttaaatgattttctgggactattggaatgtgttaaaaagaatattcctctaacagatattccgacaaaggattgattactataaatggagaatgttcctaatgtatactttaatcctgtgtttatagagcccacgtttaaacattctttattaagtgtttataaacacagattaatagttttatttgaagtattcgttgtattcattctaatatatgtattttttagatctgaattaaatatgttcttcatgcctaaacgaaaaatacccgatcctattgatagattacgacgtgctaatctagcgtgtgaagacgataaattaatgatctatggattaccatggatgacaactcaaacatctgcgttatcaataaatagtaaaccgatagtgtataaagattgtgcaaagcttttgcgatcaataaatggatcacaaccagtatctcttaacgatgttcttcgcagatgatgattcattttttaagtatttggctagtcaagatgatgaatcttcattatctgatatattgcaaatcactcaatatctagactttctgttattattattgatccaatcaaaaaataaattagaagccgtgggtcattgttatgaatctctttcagaggaatacagacaattgacaaaattcacagactttcaagattttaaaaaactgtttaacaaggtccctattgttacagatggaagggtcaaacttaataaaggatatttgttcgactttgtgattagtttgatgcgattcaaaaaagaatcctctctagctaccaccgcaatagatcctgttagatacatagatcctcgtcgtgatatcgcattttctaacgtgatggatatattaaagtcgaataaagtgaacaataattaattctttattgtcatcatgaacggcggacatattcagttgataatcggccccatgttttcaggtaaaagtacagaattaattagacgagttagacgttatcaaatagctcaatataaatgcgtgactataaaatattctaacgataatagatacggaacgggactatggacgcatgataagaataattttgaagcattggaagcaactaaactatgtgatgtcttggaatcaattacagatttctccgtgataggtatcgatgaaggacagttctttccagacattgtttaattctgtgagcgtatggcaaacggtaccgagctcaaaaattgaaaaactagcgtctttttttgctcgaagtcgaccaccatggagttcctctgggcccctctcttgggtctgtgctgcagtctggccgctgctgatcgccacaccgtcttctggaacagttcaaatcccaagttccggaatgaggactacaccatacatgtgcagctgaatgactacgtggacatcatctgtccgcactatgaagatcactctgtggcagacgctgccatggagcagtacatactgtacctggtggagcatgaggagtaccagctgtgccagccccagtccaaggaccaagtccgctggcagtgcaaccggcccagtgccaagcatggcccggagaagctgtctgagaagttccagcgcttcacacctttcaccctgggcaaggagttcaaagaaggacacagctactactacatctccaaacccatccaccagcatgaagaccgctgcttgaggttgaaggtgactgtcagtggcaaaatcactcacagtcctcaggcccatgacaatccacaggagaagagacttgcagcagatgacccagaggtgcgggttctacatagcatcggtcacagtgctgccccacgcctcttcccacttgcctggactgtgctgctccttccacttctgctgctgcaaaccccgtgattaattaatttttatcgatctaattcaacaatgtctggagagctcggatccttctgtgagcgtatggcaaacgaaggaaaaatagttatagtagccgcactcgatgggacatttcaacgtaaaccgtttaataatattttgaatcttattccattatctgaaatggtggtaaaactaactgctgtgtgtatgaaatgctttaaggaggcttccttttctaaacgattgggtgaggaaaccgagatagagataataggaggtaatgatatgtatcaatcggtgtgtagaaagtgttacgtcggctcataatattatattttttatctaaaaaactaaaaataaacattgattaaattttaatataatacttaaaaatggatgttgtgtcgttagataaaccgtttatgtattttgaggaaattgataatgagttagattacgaaccagaaagtgcaaatgaggtcgcaaaaaaactgccgtatcaaggacagttaaaactattactaggagaattattttttcttagtaagttacagcgacacggtatattagatggtgccaccgtagtgtatataggatctgctcccggtacacatatacgttatttgagagatcatttctataatttaggagtgatcatcaaatggatgctaattgacggccgccatcatgatcctattttaaatggattgcgtgatgtgactctagtgactcggttcgttgatgaggaatatctacgatccatcaaaaaacaactgcatccttctaagattattttaatttctgatgtgagatccaaacgaggaggaaatgaacctagtacggcggatttactaagtaattacgctctacaaaatgtcatgattagtattttaaaccccgtggcgtctagtcttaaatggagatgcccgtttccagatcaatggatcaaggacttttatatcccacacggtaataaaatgttacaaccttttgctccttcatattcagctgaaatgagattattaagtatttataccggtgagaacatgagactgactcgagttaccaaatcagacgctgtaaattatgaaaaaaagatgtactaccttaataagatcgtccgtaacaaagtagttgttaactttgattatcctaatcaggaatatgactattttcacatgtactttatgctgaggaccgtgtactgcaataaaacatttcctactactaaagcaaaggtactatttctacaacaatctatatttcgtttcttaaatattccaacaacatcaactgaaaaagttagtcatgaaccaatacaacgtaaaatatctagcaaaaattctatgtctaaaaacagaaatagcaagagatccgtacgcagtaataaatagaaacgtactactgagatatactaccgatatagagtataatgatttagttactttaataaccgttagacataaaattgattctatgaaaactgtgtttcaggtatttaacgaatcatccataaattatactccggttgatgatgattatggagaaccaatcattataacatcgtatcttcaaaaaggtcataacaagtttcctgtaaattttctatacatagatgtggtaatatctgacttatttcctagctttgttagactagatactacagaaactaatatagttaatagtgtactacaaacaggcgatggtaaaaagactcttcgtcttcccaaaatgttagagacggaaatagttgtcaagattctctatcgccctaatataccattaaaaattgttagatttttccgcaataacatggtaactggagtagagatagccgatagatctgttatttcagtcgctgattaatcaattagtagagatgagataagaacattataataatcaataatatatcttatatctcgtttagaaaaatgctaatattaaaatagctaacgctagtaatccaatcggaagccatttgatatctataatagggtatctaatttcctgattcagatagcggacagctatattctcggtagctactcgtttggaatcacaaacattatttacatctaatttactatctgtaatggaaacgtttcccaatgaaatggtacaatccgatacattgcattttgttatatttttttttaaagaggctggtaacaacgcatcgcttcgtttacatggctcgtaccaacaataatagggtaatcttgtatctattcctatccgtactatgcttttatcaggataaatacatttacatcgtatatcgtctttgttagcatcacagaatgcataaatttgttcgtccgtcatgataaaaatttaaagtgtaaatataactattatttttatagttgtaataaaaagggaaatttgattgtataccttcggttctttaaaagaaactgacttgataaaaatggctgtaatctctaaggttacgtatagtctatatgatcaaaaagagattaatgctacagatattatcattagtcatgttaaaaatgacgacgatatcggtaccgttaaagatggtagactaggtgctatggatggggcattatgtaagacttgtgggaaaacggaattggaatgtttcggtcactggggtaaagtaagtatttataaaactcatatagttaagcctgaatttatttcagaaattattcgtttactgaatcatatatgtattcactgcggattattgcgttcacgagaaccgtattccgacgatattaacctaaaagagttatcgggacacgctcttaggagattaaaggataaaatattatccaagaaaaagtcatgttggaacagtgaatgtatgcaaccgtatcaaaaaattactttttcaaagaaaaaggtttgtttcgtcaacaagttggatgatattaacgttcctaattctctcatctatcaaaagttaatttctattcatgaaaagttttggccattattagaaattcatcaatatccagctaacttattttatacagactactttcccatccctccgttgattattagaccggctattagtttttggatagatagtatacccaaagaaaccaatgaattaacttacttattaggtatgatcgttaagaattgtaacttgaatgctgatgaacaggttatccagaaggcggtaatagaatacgatgatattaaaattatttctaataacacttccagtatcaatttatcatatattacatccggcaaaaataatatgattagaagttatatcgtcgcccgacgaaaagatcagacggctagatctgtaattggtcccagtacatctatcaccgttaatgaggtaggaatgcccgcatatattagaaatacacttacagaaaagatatttgttaatgcctttacagtggataaagttaaacaactattagcatcaaaccaagttaaattttactttaataaacgattaaaccaattaacaagaatacgccaaggaaagtttatcaaaaataaaatacatttattgcctggtgattgggtagaagtagctgttcaagaatatacaagtattatttttggaagacagccgtctctacatagatacaacgtcatcgcttcatctatcagagctaccgaaggagatactatcaaaatatctcccggaattgccaactctcaaaatgctgatttcgacggagatgaagaatggatgatattagaacaaaatcctaaagctgtaattgaacaaagtattcttatgtatccgacgacgttactcaaacacgatattcatggagcccccgtttatggatctattcaagatgaaatcgtagcagcgtattcattgtttaggatacaagatctttgtttagatgaagtattgaacatcttggggaaatatggaagagagttcgatcctaaaggtaaatgtaaattcagcggtaaagatatctatacttacttgataggtgaaaagattaattatccgggtctcttaaaggatggtgaaattattgcaaacgacgtagatagtaattttgttgtggctatgaggcatctgtcattggctggactcttatccgatcataagtcgaacgtggaaggtatcaactttattatcaagtcatcttatgtttttaagagatatctatctatttacggttttggggtgacattcaaagatctgagaccaaattcgacgttcactaataaattggaggccatcaacgtagaaaaaatagaacttatcaaagaagcatacgccaaatatctcaacgatgtaagagacgggaaaatagttccattatctaaagctttagaggcggactatgtggaatccatgttatccaacttgacaaatcttaatatccgagagatagaagaacatatgagacaaacgctgatagatgatccagataataacctcctgaaaatggccaaagcgggttataaagtaaatcctacagaactaatgtatattctaggtacgtatggacaacaaaggattgatggtgaaccagcagagactcgagtattgggtagagtcttaccttactatcttccagactctaaggatccagaaggaagaggttacattcttaattctttaacaaaaggattaacaggttctcaatattacttttcgatgctggttgcaagatctcaatctactgatatcgtctgtgaaacatcacgtaccggaacactggctagaaaaatcattaaaaagatggaggatatggtggtcgacggatacggacaagtagttataggtaatacgctcatcaagtacgccgccaattataccaaaattctaggctcagtatgtaaacctgtagatcttatctatccagatgagtccatgacttggtatttggaaattagtgctctgtggaataaaataaaacagggattcgtttactctcagaaacagaaacttgcaaagaagacattggcgccgtttaatttcctagtattcgtcaaacccaccactgaggataatgctattaaggttaaggatctgtacgatatgattcataacgtcattgatgatgtgagagagaaatacttctttacggtatctaatatagattttatggagtatatattcttgacgcatcttaatccttctagaattagaattacaaaagaaacggctatcactatctttgaaaagttctatgaaaaactcaattatactctaggtggtggaactcctattggaattatttctgcacaggtattgtctgagaagtttacacaacaagccctgtccagttttcacactactgaaaaaagtggtgccgtcaaacaaaaacttggtttcaacgagtttaataacttgactaatttgagtaagaataagaccgaaattatcactctggtatccgatgatatctctaaacttcaatctgttaagattaatttcgaatttgtatgtttgggagaattaaatccagacatcactcttcgaaaagaaacagataggtatgtagtagatataatagtcaatagattatacatcaagagagcagaaattaccgaattagtcgtcgaatatatgattgaacgattcatctcctttagcgtcattgtaaaggaatggggtatggaaacattcattgaggacgaggataatattagatttactgtctatctaaatttcgttgaaccagaggaattgaatcttagtaagtttatgatggttcttccgggggcagccaacaagggaaagattagtaaattcaagattcctatctctgattatacgggttatgacgacttcaatcaaacaaaaaagctcaataagatgactgtagaactcatgaatctaaaagaattaggttctttcgatttggaaaacgtcaacgtgtatcctggagtatggaatacatacgatatcttcggtatcgaggccgctcgtgaatacttgtgcgaagccatgttaaacacctatggagaagggttcgattatctgtatcagccttgtgatcttctcgctagtttactatgtgctagttacgaaccagaatcagtgaataaattcaagttcggcgcagctagtactcttaagagagctacgttcggagacaataaagcattgttaaacgcggctcttcataaaaagtcagaacctattaacgataatagtagctgccacttttttagcaaggtccctaatataggaactggatattacaaatactttatcgacttgggtcttctcatgagaatggaaaggaaactatctgataagatatcttctcaaaagatcaaggaaatggaagaaacagaagacttttaattcttatcaataacatatttttctatgatctgtcttttaaacgatggattttccacaaatgcgcctctcaagtccctcatagaatgatacacgtataaaaaatatagcataggcaatgactccttatttttagacattagatatgccaaaatcatagccccgcttctatttactcccgcagcacaatgaaccaacacgggctcgtttcgttgatcacatttagataaaaaggcggttacgtcgtcaaaatatttactaatatcggtagttgtatcatctaccaacggtatatgaataatattaatattagagttaggtaatgtatatttatccatcgtcaaatttaaaacatatttgaacttaacttcagatgatggtgcatccatagcatttttataatttcccaaatacacattattggttacccttgtcattatagtgggagatttggctctgtgcatatctccagttgaacgtagtagtaagtatttatacaaacttttcttatccatttataacgtacaaatggataaaactactttatcggtaaacgcgtgtaatttagaatacgttagagaaaaggctatagtaggcgtacaagcagccaaaacatcaacacttatattctttgttattatattggcaattagtgcgctattactctggtttcagacgtctgataatccagtctttaatgaattaacgagatatatgcgaattaaaaatacggttaacgattggaaatcattaacggatagcaaaacaaaattagaaagtgatagaggtagacttctagccgctggtaaggatgatatattcgaattcaaatgtgtggatttcggcgcctattttatagctatgcgattggataagaaaacatatctgccgcaagctattaggcgaggtactggagacgcgtggatggttaaaaaggcggcaaaggtcgatccatctgctcaacaattttgtcagtatttgataaaacacaagtctaataatgttattacttgtggtaatgagatgttaaatgaattaggttatagcggttattttatgtcaccgcattggtgttccgattttagtaatatggaatagtgttagataaatgcggtaacgaatgttcctgtaaggaaccataacagtttagatttaacgttaaagatgagcataaacataataaacaaaattacaatcaaacctataacattaatatcaaacaatccaaaaaatgaaatcagtggagtagtaaacgcgtacataactcctggataacgtttagtagctgccgttcctattctagaccaaaaattcggtttcatgttttcgaaacggtgttctgcaacaagtcggggatcgtgttctacatatttggcggcattatccagtatctgcctattgatcttcatttcgttttcaattctggctatttcaaaataaaatcccgatgatagacctccagactttataatttcatctacgatgttcagcgccgtagtaactctaataatataggctgataagctaacatcataccctcctgtatatgtgaatatggcatgatttttgtccattacaagctcggttttaactttattgcctgtaataatttctctcatctgtaggatatctatttttttgtcatgcattgccttcaagacgggacgaagaaacgtaatatcctcaataacgttatcgttttctacaataactacatattctacctttttattttctaactcggtaaaaaaattagaatcccatagggctaaatgtctagcgatatttcttttcgtttcctctgtacacatagtgttacaaaaccctgaaaagaagtgagtatacttgtcatcatttctaatgtttcctccagtccactgtataaacgcataatccttgtaatgatctggatcatccttgactaccacaacatttcttttttctggcataacttcgttgtcctttacatcatcgaacttctgatcattaatatgctcatgaacattaggaaatgtttctgatggaagtctatcaataactggcacaacaataacaggagttttcgccgccgccatttagttattgaaattaatcatatacaactctttaatacgagttatattttcgtctatccattgtttcacatttacatatttcgacaaaaagatataaaatgcgtattccaatgcttctctgtttaatgaattactaaaatatacaaacacgtcactgtctggcaataaatgatatcttagaatattgtaacaatttattttgtattgcacatgttcgtgatctatgagttcttcttcgaatggcataggatctccgaatctgaaaacgtataaataggagttagaataataatatttgagagtattggtaatatataaactctttagcggtataattagtttttttctctcaatttctatttttagatgtgatggaaaaatgactaattttgtagcattagtatcatgaactctaatcaaaatcttaatatcttcgtcacacgttagctctttgaagtttttaagagatgcatcagttggttcgaccgatggagtaggtgcaacaattttttgttcgatgtatgtatgtactggagccattgttttaactataatggtgcttgtatcgaaaaactttaatgcagatagcggaagctcttcgccgcgactttctacatcgtaattgggttctaacgccgatctctgaatggatactagttttctaagttctaatgtgattctctgaaaatgtaaatccaattcctccggcattatagatgtgtatacatcggtaaataaaactatagtatccaacgatcccttctcgcaaattctagtcttaaccaaaaaatcgtatataaccacggagatggcgtatttaagagtggattcttctaccgttttgttcttggatgtcatataggaaactataaagtccgcactactgttaagaatgattactaacgcaactatatagttcaaattaagcattttggaaacataaaataactctgtagacgatacttgactttcgaataagtttgcagacaaacgaagaaagaacagacctctcttaatttcagaagaaaactttttttcgtattcctgacgtctagagtttatatcaataagaaagttaagaattagtcggttaatgttgtatttcattacccaagtttgagatttcataatattatcaaaagacatgataatattaaagataaagcgctgactatgaacgaaatagctatatggttcgctcaaaaatatagtcttgttaaacgtggaaacgataactgtatttttaatcacgtcagcggcatctaaattaaatataggtatatttattccacacactctacaatatgccacaccatcttcataataaataaattcgttagcaaaattattaattttagtgaaatagttagcgtcaactttcatagcttccttcaatctaatttgatgctcacacggtgcgaattccactctaacatcccttttccatgcctcaggttcatcgatctctataatatctagttttttgcgtttcacaaacacaggctcgtctctcgcgatgagatctgtatagtaactatgtaaatgataactagatagaaagatgtagctatatagatgacgatcctttaagagaggtataataactttaccccaatcagatagactgttgttatggtcttcggaaaaagaatttttataaatttttccagtattttccaaatatacgtacttaacatctaaaaaatccttaatgataataggaatggataatccgtctattttataaagaaatacatatcgcacattatacttttttttggaaatgggaataccgatgtgtctacataaatatgcaaagtctaaatattttttagagaatcttaattggtccaaattcttttccaagtacggtaatagatttttcatattgaacggtatcttcttaatctctggttctagttccgcattaaatgatgaaactaagtcactatttttataactaacgattacatcacctctaacatcatcatttaccagaatactgatcttcttttgtcgtaaatacatgtctaatgtgttaaaaaaaagatcatacaagttatacgtcatttcatctgtggtattcttgtcattgaaggataaactcgtactaatctcttctttaacagcctgttcaaatttatatcctatatacgaaaaaatagcaaccagtgtttgatcatccgcgtcaatattctgttctatcgtagtgtataacaatcgtatatcttcttctgtgatagtcgatacgttataaaggttgataacgaaaatatttttatttcgtgaaataaagtcatcgtaggattttggacttatattcgcgtctagtagatatgcttttatttttggaatgatctcaattagaatagtctctttagagtccatttaaagttacaaacaactaggaaattggtttatgatgtataatttttttagtttttatagattctttattctatacttaaaaaatgaaaataaatacaaaggttcttgagggttgtgttaaattgaaagcgagaaataatcataaattatttcattatcgcgatatccgttaagtttgtatcgtaatggcgtggtcaattacaaataaagcggatactagtagcttcacaaagatggctgaaatcagagctcatctaaaaaatagcgctgaaaataaagataaaaacgaggatattttcccggaagatgtaataattccatctactaagcccaaaaccaaacgagccactactcctcgtaaaccagcggctactaaaagatcaaccaaaaaggaggaagtggaagaagaagtagttatagaggaatatcatcaaacaactgaaaaaaattctccatctcctggagtcagcgacattgtagaaagcgtggccgctgtagagctcgatgatagcgacggggatgatgaacctatggtacaagttgaagctggtaaagtaaatcatagtgctagaagcgatctctctgacctaaaggtggctaccgacaatatcgttaaagatcttaagaaaattattactagaatctctgcagtatcgacggttctagaggatgttcaagcagctggtatctctagacaatttacttctatgactaaagctattacaacactatctgatctagtcaccgagggaaaatctaaagttgttcgtaaaaaagttaaaacttgtaagaagtaaatgcgtgcacttttttataaagatggtaaactctttaccgataataattttttaaatcctgtatcagacgataatccagcgtatgaggttttgcaacatgttaaaattcctactcatttaacagatgtagtagtatatgaacaaacgtgggaggaggcgttaactagattaatttttgtgggaagtgattcaaaaggacgtagacaatacttttacggaaaaatgcatgtacagaatcgcaacgctaaaagagatcgtatttttgttagagtatataacgttatgaaacgaattaattgttttataaacaaaaatataaagaaatcgtccacagattccaattatcagttggcggtttttatgttaatggaaactatgttttttattagatttggtaaaatgaaatatcttaaggagaatgaaacagtagggttattaacactaaaaaataaacacatagaaataagtcccgatgaaatagttatcaagtttgtaggaaaggacaaagtttcacatgaatttgttgttcataagtctaatagactatataagccgctattgaaactgacggatgattctagtcccgaagaatttctgttcaacaaactaagtgaacgaaaggtatatgaatgtatcaaacagtttggtattagaatcaaggatctccgaacgtatggagtcaattatacgtttttatataatttttggacaaatgtaaagtccatatctcctcttccatcaccaaaaaagttaatagcgttaactatcaaacaaactgctgaagtggtaggtcatactccatcaatttcaaaaagagcttatatggcaacgactattttagaaatggtaaaggataaaaattttttagatgtagtatctaaaactacgttcgatgaattcctatctatagtcgtagatcacgttaaatcatctacggatggatgatatagatctttacacaaataattacaaaaccgataaatggaaatggataagcgtatgaaatctctcgcaatgaccgctttctttggggagctaagcacattagatattatggcattgataatgtctatatttaaacgccatccaaacaataccattttttcagtggataaggatggtcagtttatgattgatttcgaatacgataattataaggcttctcaatatttggatctgaccctcactccgatatctggagatgaatgcaagactcacgcatcgagtatagccgaacaattggcgtgtgtggatattattaaagaggatattagcgaatatatcaaaactactccccgtcttaaacgatttataaaaaaataccgcaatagatcagatactcgcatcagtcgagatacagaaaagcttaaaatagctctagctaaaggcatagattacgaatatataaaagacgcttgttaataagtaaatgaaaaaaaactagtcgtttataataaaacacgatatggatgccaacgtagtatcatcttctactattgcgacgtatatagacgctttagcgaagaatgcttcggaattagaacagaggtctaccgcatacgaaataaataatgaattggaactagtatttattaagccgccattgattactttgacaaatgtagtgaatatctctacgattcaggaatcgtttattcgatttaccgttactaataaggaaggtgttaaaattagaactaagattccattatctaaggtacatggtctagatgtaaaaaatgtacagttagtagatgctatagataacatagtttgggaaaagaaatcattagtgacggaaaatcgtcttcacaaagaatgcttgttgagactatcgacagaggaacgtcatatatttttggattacaagaaatatggatcctctatccgactagaattagtcaatcttattcaagcaaaaacaaaaaactttacgatagactttaagctaaaatattttctaggatccggtgcccagtctaaaagttctttattacacgctattaatcatccaaagtcaaggcctaatacatctctggaaatagaatttacacctagagacaatgaaacagttccatatgatgaactaataaaggaattgacgactctctcgcgtcatatatttatggcttctccagagaatgtaattctttctccgcctattaacgcgcctataaaaacctttatgttgcctaaacaagatatagtaggtttggatctggaaaatctatatgccgtaactaagactgacggcattcctataactatcagagttacatcaaacgggttgtattgttattttacacatcttggttatattattagatatcctgttaagagaataatagattccgaagtagtagtctttggtgaggcagttaaggataagaactggaccgtatatctcattaagctaatagagcctgtgaatgcaatcaatgatagactagaagaaagtaagtatgttgaatctaaactagtggatatttgtgatcggatagtattcaagtcaaagaaatacgaaggtccgtttactacaactagtgaagtcgtcgatatgttatctacatatttaccaaagcaaccagaaggtgttattctgttctattcaaagggacctaaatctaacattgattttaaaattaaaaaggaaaatactatagaccaaactgcaaatgtagtatttaggtacatgtccagtgaaccaattatctttggagagtcgtctatctttgtagagtataagaaatttagcaacgataaaggctttcctaaagaatatggttctggtaagattgtgttatataacggcgttaattatctaaataatatctattgtttggaatatattaatacacataatgaagtgggtattaagtccgtggttgtacctattaagtttatagcagaattcttagttaatggagaaatacttaaacctagaattgataaaaccatgaaatatattaactcagaagattattatggaaatcaacataatatcatagtcgaacatttaagagatcaaagcatcaaaataggagatatctttaacgaggataaactatcggatgtgggacatcaatacgccaataatgataaatttagattaaatccagaagttagttattttacgaataaacgaactagaggaccgttgggaattttatcaaactacgtcaagactcttcttatttctatgtattgttccaaaacatttttagacgattccaacaaacgaaaggtattggcgattgattttggaaacggtgctgacctggaaaaatacttttatggagagattgcgttattggtagcgacggatccggatgctgatgctatagctagaggaaatgaaagatacaacaaattaaactctggaattaaaaccaagtactacaaatttgactacattcaggaaactattcgatccgatacatttgtctctagtgtcagagaagtattctattttggaaagtttaatatcatcgactggcagtttgctatccattattcttttcatccgagacattatgctaccgtcatgaataacttatccgaactaactgcttctggaggcaaggtattaatcactaccatggacggagacaaattatcaaaattaacagataaaaagacttttataattcataagaatttacctagtagcgaaaactatatgtctgtagaaaaaatagctgatgatagaatagtggtatataatccatcaacaatgtctactccaatgactgaatacattatcaaaaagaacgatatagtcagagtgtttaacgaatacggatttgttcttgtagataacgttgatttcgctacaattatagaacgaagtaaaaagtttattaatggcgcatctacaatggaagatagaccatctacaagaaactttttcgaactaaatagaggagccattaaatgtgaaggtttagatgtcgaagacttacttagttactatgttgtttatgtcttttctaagcggtaaataataatatggtatgggttctgatctcccagttctaaatgcattaaataattccaatagagcgatttttgttcctataggaccttccaactgtggatactctgtattgttaatagatatattaatacttttgtcgggtaacagaggttctacgtcttttaaaaataaaagtttgataacatctggcctgttcataaataaaaacttggcgattctatatatactcttattatcaaatctagccattgtcttatagatgtgagctactgtaggtgtaccatttgattttctttctaatactatatatttctctcgaagaagttcttgcacatcatctgggaataaaatactactgttgagtaaatcagttattttttttatatcgatattgatggacatttttatagttaaggataataagtatcccaaagtagataacgacgataacgaagtatttatacttttaggaaatcacaatgactttatcagattaaaattaacaaaattaaaggagcatgtatttttttctgaatatattgtgactccagatacatatggatctttatgcgtcgaattaaatgggtctagttttcagcacggcggtagatatatagaggtggaggaatttatagatgctggaagacaagttagatggtgttctacatccaatcatatatctaaagatatacccgaagatatgcacactgataaatttgtcatttatgatatatacacttttgacgctttcaagaataaacgattggtattcgtacaggtacctccgtcgttaggagatgatagtcatttgactaatccgttattgtctccgtattatcgtaattcagtagccagacaaatggtcaatgatatgatttttaatcaagattcatttttaaaatatttattagaacatctgattagaagccactatagagtttctaaacatataacaatagttagatacaaggataccgaagaattaaatctaacgagaatatgttataatagagataagtttaaggcgtttgtattcgcttggtttaacggcgtttcggaaaatgaaaaggtactagatacgtataaaaaggtatctaatttgatataatgaattcagtgactgtatcacacgcgccatatactattacttatcacgatgattgggaaccagtaatgagtcaattggtagagttttataacgaagtagccagttggctgctacgagacgagacgtcgcctattcctgataagttctttatacagttgaaacaaccgcttagaaataaacgagtatgtgtgtgcggtatagatccgtatccgaaagatggaactggtgtaccgttcgaatcaccaaattttacaaaaaaatcaattaaggagatagcttcatctatatctagattaaccggagtaattgattataaaggttataaccttaatataatagacggggttataccctggaattattacttaagttgtaaattaggagaaacaaaaagtcacgcgatctactgggataagatttccaagttactgctgcagcatataactaaacacgttagtgttctttattgtttgggtaaaacagatttctcgaatatacgggccaagttagaatccccggtaactaccatagtcggatatcatccagcggctagagaccgccaattcgagaaagatagatcatttgaaattatcaacgttttactggaattagacaacaaggcacctataaattgggctcaagggtttatttattaatgctttagtgaaattttaacttgtgttctaaatggatgcggctattagaggtaatgatgttatctttgttcttaagactataggtgtcccgtcagcgtgcagacaaaatgaagatccaagatttgtagaagcatttaaatgcgacgagttagaaagatatattgagaataatccagaatgtacactattcgaaagtcttagggatgaggaagcatactctatagtcagaattttcatggatgtagatttagacgcgtgtctagacgaaatagattatttaacggctattcaagattttattatcgaggtgtcaaactgtgtagctagattcgcgtttacagaatgcggcgccattcatgaaaatgtaataaaatccatgagatctaatttttcattgactaagtctacaaatagagataaaacaagttttcatattatctttttagacacgtataccactatggatacattgatagctatgaaacgaacactattagaattaagtagatcatctgaaaatccactaacaagatcgatagacactgccgtatataggagaaaaacaactcttcgggttgtaggtactaggaaaaatccaaattgcgacactattcatgtaatgcaaccaccgcatgataatatagaagattacctattcacttacgtggatatgaacaacaatagttattacttttctctacaacaacgattggaggatttagttcctgataagttatgggaaccagggtttatttcattcgaagacgctataaaaagagtttcaaaaatattcattaattctataataaactttaatgatctcgatgaaaataattttacaacggtaccactggtcatagattacgtaacaccttgtgcattatgtaaaaaacgatcgcataaacatccgcatcaactatcgttggaaaatggtgctattagaatttacaaaactggtaatccacatagttgtaaagttaaaattgttccgttggatggtaataaactgtttaatattgcacaaagaattttagacactaactctgttttattaaccgaacgaggagaccatatagtttggattaataattcatggaaatttaacagcgaagaacccttgataacaaaactaattttgtcaataagacatcaactacctaaggaatattcaagcgaattactctgtccaagaaaacgaaagactgtagaagctaacatacgagacatgttagtagattcagtagagaccgatacctatccggataaacttccgtttaaaaatggtgtattggacctggtagacggaatgttttactctggagatgatgctaaaaaatatacgtgtactgtatcaaccggatttaaatttgacgatacaaagttcgtcgaagacagtccagaaatggaagagttaatgaatatcattaacgatatccaaccattaacggatgaaaataagaaaaatagagagctatatgaaaaaacattatctagttgtttatgcggtgctaccaaaggatgtttaacattcttttttggagaaactgcaactggaaagtcgacaaccaaacgtttgttaaagtctgctatcggtgacctgtttgttgagacgggtcaaacaattttaacagatgtattggataaaggacctaatccatttatcgctaacatgcatttgaaaagatctgtattctgtagcgaactacctgattttgcctgtagtggatcaaagaaaattagatctgacaatattaaaaagttgacagaaccttgtgtcattggaagaccgtgtttctccaataaaattaataatagaaaccatgcgacaatcattatcgatactaattacaaacctgtttttgataggatagataacgcattaatgagaagaattgccgtcgtgcgattcagaacacacttttctcaaccttctggtagagaggctgctgaaaataatgacgcgtacgataaagtcaaactattagacgaggggttagatggtaaaatacaaaataatagatatagattcgcatttctatacttgttggtgaaatggtacagaaaatatcatgttcctattatgaaactatatcctacacccgaagagattcctgactttgcattctatctcaaaataggtactctgttagtatctagctctgtaaagcatattccattaatgacggacctctccaaaaagggatatatattgtacgataatgtggtcactcttccgttgactactttccaacagaaaatatccaagtattttaattctagactatttggacacgatatagagagcttcatcaatagacataagaaatttgccaatgttagtgatgaatatctgcaatatatattcatagaggatatttcatctccgtaaatatatgctcatatatttatagaagatatcacatatctaaatgaataccggaatcatagatttatttgataatcatgttgatagtataccaactatattacctcatcagttagctactctagattatctagttagaactatcatagatgagaacagaagcgtgttattgttccatattatgggatcaggtaaaacaataatcgctttgttgttcgccttggtagcttccagatttaaaaaggtttacattctagtgcctaatatcaacattttgaaaatttttaattataatatgggtgtagctatgaacttgtttaatgacgaattcatagctgagaatatctttattcattccacaacaagtttttattctcttaattataacgataacgtcattaattataacggattatctcgctacaataactctatttttatcgttgatgaggcacataatatctttgggaataatactggagaacttatgaccgtgataaaaaataaaaacaagattccttttctactattgtctggatctcccattactaacacacctaatactctgggtcatattatagatttaatgtccgaagagacgatagattttggtgagattattagtcgtggtaagaaagtaattcagacacttcttaacgaacgcggtgtgaatgtacttaaggatttgcttaaaggaagaatatcatattacgaaatgcctgataaagatctaccaacgataagatatcacggacgtaagtttctagatactagagtagtatattgtcacatgtctaaacttcaagagagagattatatgattactagacgacagctatgttatcatgaaatgtttgataaaaatatgtataacgtgtcaatggcagtattgggacaacttaatctgatgaataatttagatactttatttcaggaacaggataaggaattgtacccaaatctgaaaataaataatggcgtgttatacggagaagaattggtaacgttaaacattagttccaaatttaaatactttattaatcggatacagacactcaacggaaaacattttatatacttttctaattctacatatggcggattggtaattaaatatatcatgctcagtaatggatattctgaatataatggttctcagggaactaatccacatatgataaacggcaaaccaaaaacatttgctatcgttactagtaaaatgaaatcgtctttagaggatctattagatgtgtataattctcctgaaaacgatgatggtagtcaattgatgtttttgttttcgtcaaacattatgtccgaatcctatactctgaaagaggtaaggcatatttggtttatgactatcccagatactttttctcaatacaaccaaattcttggacgatctattagaaaattctcttacgccgatatttctgaaccagttaatgtatatcttttagccgccgtatattccgatttcaatgacgaagtaacgtcattaaacgattacacacaggatgaattgattaatgttttaccatttgacatcaaaaagctgttatatctaaaatttaagactaaagaaacgaatagaatatactctattcttcaagagatgtctgaaacgtattctcttccaccacatccatcaattgtaaaagttttattgggagaattggtcagacaatttttttataataattctcgtattaagtataacgactccaagttacttaaaatggttacatcagttataaaaaataaagaagacgctaggaattacatagatgatattgtaaacggtcacttctttgtatcgaataaagtatttgataaatctcttttatacaaatacgaaaacgatattattacagtaccgtttagactttcctacgaaccatttgtttggggagttaactttcgtaaagaatataacgtggtatcttctccataaaactgatgaaatatataaagaaataaatgtcgagctttgttaccaatggataccttccagttacattggaaccacacgagctgacgttagacataaaaactaatattaggaatgccgtatataagacgtatctccatagagaaattagtggtaaaatggccaagaaaatagaaattcgtgaagacgtggaattacctctcggcgaaatagttaataattctgtagttataaacgttccgtgtgtaataacctacgcgtattatcacgttggggatatagtcagaggaacattaaacatcgaagatgaatcaaatgtaactattcaatgtggagatttaatctgtaaactaagtagagattcgggtactgtatcatttagcgattcaaagtactgcttttttcgaaatggtaatgcgtatgacaatggcagcgaagtcactgccgttctaatggaggctcaacaaggtatcgaatctagttttgtttttctcgcgaatatcgtcgactcataaaaaagagaatagcggtaagtataaacacgaatactatggcaataattgcgaatgttttattctcttcgatatatttttgataatatgaaaaacatgtctctctcaaatcggacaaccatctcataaaatagttctcgcgcgctggagaggtagttgctgctcgtataatctccccagaataatatacttgcgtgtcgtcgttcaatttatacggatttctatagttctctgttatataatgcggttttccatcatgattagacgacgacaatagtgttctgaatttagatagttgatcagaatgaatgtttattggcgttggaaaaattatccatacagcgtctgcagagtggttgatagttgttcctagatatgtaaaataatccaacttactaggcagcaaattgtctagataaaatactgaatcaaacggtgcagacgtattggcggatctaatggaatccaattgattaactatcttttgaaaatatacatttttatgatccaatacttgtaagaatatagaaataatgataagtccatcatcgtgtttttttgcctcttcataagaactatattttttcttattccaatgaacaagattaatctctccagagtatttgtacacatctatcaagtgattggatccataatcgtcttcctttccccaatatatatgtagtgatgataacacatattcattggggagaaaccctccacttatatatcctcctttaaaattaatccttactagttttccagtgttctggatagtggttggtttcgactcattataatgtatgtctaacggcttcaatcgcgcgttagaaattgcttttttagtttctatattaataggagatagttgttgcggcatagtaaaaatgaaatgataactgtttaaaaatagctcttagtatgggaattacaatggatgaggaagtgatatttgaaactcctagagaattaatatctattaaacgaataaaagatattccaagatcaaaagacacgcacgtgtttgctgcgtgtataacaagtgacggatatccgttaataggagctagaagaacttcattcgcgttccaggcgatattatctcaacaaaattcagattctatctttagagtatccactaaactattacggtttatgtactacaatgaactaagagaaatctttagacggttgagaaaaggttctatcaacaatatcgatcctcactttgaagagttaatattattgggtggtaaactagataaaaaggaatctattaaagattgtttaagaagagaattaaaagaggaaagtgatgaacgtataacagtaaaagaattcggaaatgtaattctaaaacttacaacgcgcgataaattatttaataaagtatatataggttattgcatggcgtgttttattaatcaatcgttggaggatttatcgcatactagtatttacaatgtagaaattagaaagattaaatcattaaatgattgtattaacgacgataaatacgaatatctgtcttatatttataatatgctagttaatagtaaatgaacttttacagatctagtataattagtcagattattaagtataatagacgactagctaagtctattatttgcgaggatgactctcaaattattacactcacggcattcgttaaccaatgcctatggtgtcataaacgagtatccgtgtccgctattttattaactactgataacaaaatattagtatgtaacagacgagatagttttctctattctgaaataattagaactagaaacatgtttagaaagaaacgattatttctgaattattccaattatttgaacaaacaggaaagaagtatactatcgtcatttttttctctagatccagctactgctgataatgatagaatagacgctatttatccgggtggcatacccaaaaggggtgagaatgttccagagtgtttatccagggaaattaaagaagaagttaatatagacaattcttttgtattcatagacactcggttttttattcatggcatcatagaagataccattattaataaattttttgaggtaatcttctttgtcggaagaatatctctaacgagtgatcaaatcattgatacatttaaaagtaatcatgaaatcaaggatctaatatttttagatccgaattcaggtaatggactccaatacgaaattgcaaaatatgctctagatactgcaaaactcaaatgttatggccatagaggatgttattacgaatcattaaaaaaattaactgaggatgattgattagaaaatataaattaatttaccatcgtgtatttttataacgggattgtccggcatatcatgtagatagttaccgtctacatcgtatactcgaccatctacgcctttaaatcctctatttattgacattaatctattagaattggaataccaaatattagtaccctcaattagtttattggtaatatttttgttagacgatagatcgatggctcttgaaaccaaggttttccaaccggactcattgtcgatcggtgagaagtctttttcattagcatgaatccattctaatgatgtatgtttaaacactctaaacaattggacaaattcttttgatttgctttgaatgatttcaaataggtcttcgtctacagtaggcataccattagataatctagccattataaagtgcacgtttacatatctacgttctggaggagtaagaacgtgactattgagacgaatggctcttcctactatctgacgaagagacgcctcgttccatgtcatatctaaaatgaagatatcattgattgagaagaagctaataccctcgcctccactagaagagaatacgcatgttttaatgcattctccgttagtgtttgattcttggttaaactcagccaccgccttgattctagtatcttttgttctagatgagaactctatattagagataccaaagactttgaaatatagtaataagatttctattcctgactgattaacaaatggttcaaagactagacatttaccatgggatgctaatattcccaaacatacatctataaatttgacgcttttctcttttaattcagtaaatagagagatatcagccgcactagcatcccctcccaatagttctccccttttaaaggtatctaatgcagatttagaaaattctctatctcttaatgaatttttaaaatcattatatagtgttgctatctcttgcgcgtattcgcccggatcacgattttgtctttcaggaaagctatcgaacgtaaacgtagtagccatacgtctcagaattctaaatgatgatatacctgtttttatttcagcgagtttagccttttgataaatttcttcttgctttttcgacatattaacgtatcgcattaatactgttttcttagcgaatgatgcagacccttctacgtcatcaaaaatagaaaactcgttattaactatgtacgaacataggcctcctagtttggagactaattctttttcatcaactagacgtttattctcaaatagcgattggtgttgtaaggatcctggtcgtagtaagttaaccaacatggtgaattcttgcacactattgacgataggtgtagccgataaacaaatcatcttatggttttttaatgcgatggtcttagataaaaaattatatactgaacgagtaggacggatcttaccatcttctttgattaatgatttagaaatgaagttatgacattcatcaataatgacgcatattctactcttggaattaatagttttgatattagtaaaaaatttatttctaaaattttgatcatcgtaattaataaaaatacaatccttcgttatctctggagcgtatctgagtatagtgttcatccaaggatcttctatcaaagcctttttcaccaataagataatagcccaattcgtataaatatccttaagatgtttgagaatatatacagtagtcattgttttaccgacacccgtttcatggaacaataaaagagaatgcatactgtctaatcctaagaaaactcttgctacaaaatgttgataatccttgaggcgtactacgtccgaccccatcatttcaacaggcatattagtagttctgcgcaatgcataatcgatataggccgcgtgtgatttactcatttatgagtgataagtaataactatgttttaaaaatcacagcagtagtttaactagtcttctctgatgtttgttttcgatactttttgaatcagaagtcatactagaataaagcaacgagtgaacgtaatagagagcttcgtatactctattcgaaaactctaagaacttattaatgaattccgtatccactggattgtttaaaatactaaattgaacactgttcacatccttccaagaagaagacttagtgacggacttaacatgagacataaataaatccaaattttttttacaaacatcactagccaccataatggcgctatcttttaaccagctatcgcttacgcattttagcagtctaacatttttaaagagactacaatatattctcatagtatcgattacacctctaccgaataaagttggaagtttaataatacaatatttttcgtttacaaaatcaaataatggtcgaaacacgtcgaaggttaacatcttataatcgctaatgtatagattgttttcagtgagatgattattagatttaatagcatctcgttcacgtttgaacagtttattgcgtgcgctgaggtcggcaactacggcgtccgctttagtactcctcccataatactttacgctattaatctttaaaatttcatagactttatctagatcgctttctggtaacatgatatcatgtgtaaaaagttttaacatgtcggtcggcattctatttagatcattaactctagaaatctgaagaaagtaattagctccgtattccagactaggtaatgggcttttacctagagacagattaagttctggcaatgtttcataaaatggaagaaggacatgcgttccctcccggatattttttacaatttcatccatttacaactctatagtttgttttcattattattagttattatctcccataatcttggtaatacttaccccttgatcgtaagataccttatacaggtcattacatacaactaccaattgtttttgtacataatagattggatggttgacatccatggtggaataaactactcgaacagatagtttatctttccccctagatacattagccgtaatagttgtcggcctaaagaatatctttggtgtaaagttaaaagttagggttcttgttccattattgctttttgtcagtagttcattataaattctcgagatgggtccgttctctgaatatagaacatcatttccaaatctaacttctagtctagaaataatatcggtcttattcttaaaatctattcccttgatgaagggatcgttaatgaacaaatccttggcctttgattcggctgatctattatctccgttatagacgttacgttgactagtccaaagacttacaggaatagatgtatcgatgatgttgatactatgtgatatgtgagcaaagattgttctcttagtggcatcactatatgttccagtaatggcggaaaactttttagaaatgttatatataaaagaattttttcgtgttccaaacattagcagattagtatgaagataaacactcatattatcaggaacattatcaatttttacatacacatcagcatcttgaatagaaacgataccatcttctggaacctctacgatctcggcagactccggataaccagtcggtggaccatcgctaacaataactagatcatccaacaatctactcacatatgcatctatataatctttttcatcttgtgagtaccctggatacgaaataaatttattatccgtatttccataataaggtttagtataaacagagagcgatgttgccgcatgaacttcagttacagtcgccgttggttggtttatttgacctattactctcctaggtttctctataaatgatggtttaatttgtacattcttaaccatatatccaataaagctcaattcaggaacataaacaaattctttgttgaacgtttcaaagtcgaacgaagagtcacgaataacgatatcggatactggattgaaggttaccgttacggtaatttttgaatcggatagtttaagactgctgaatgtatcttccacatcaaacggagttttaatataaacgtatactgtagatggttctttaatagtgtcattaggagttaggccaatagaaatatcattaagttcactagaatatccagagtgtttcaaagcaattgtattattgatacaattattatataattcttcgccctcaatttcccaaataacaccgttacacgaagagatagatacgtgattaatacatttatatccaacatatggtacgtaaccgaatcttcccatacctttaacttctggaagttccaaactcagaaccaaatgattaagcgcagtaatatactgatccctaatttcgaagctagcgatagcctgattgtctggaccatcgtttgtcataactccggatagagaaatatattgcggcatatataaagttggaatttgactatcgactgcgaagacattagaccgtttaatagagtcatccccaccgatcaaagaattaatgatagtattattcattttctatttaaaatggaaaaagcttacaataaactccgtagagaaatatctataatttgtgagttttccttaaagtaacagcttccgtaaacgccgtctttatctcttagtaagtttattgtatttataaccttttccttatcttcatagaatactaaaggcaacaaagaaatttttggttcttctctaagagctacgtgagacttaaccatagacgccaacgaatccctacatattttagaacagaaatacccaacttcaccacccttgaatgtctcaatactaataggtttaaaaaccaaatcttgattacaaaaccaacacttatcaattacactatttgtcttaatagacacatctgccatagatttataatactttggtagtatacaagcgagtgcttcttctttagcgggcttaaagactgctttaggtgctgaaataaccacatctggaaggcttactcgcttagccatttaattacggaactatttttttatacttctaatgagcaagtagaaaacctctcatctacaaaaacatactcgtgtccataatcctctaccatagttacacgttttttagatctcatatgtgctaaaaagttttcccatactaattggttactattatttttcgtataatttttaacagtttgaggttttagatttttagttacagaagtgatatcgaatattttatccaaaaagaatgaataattaattgtcttagaaggagtgttttcttggcaaaagaataccaagtgcttaaatatttctactacttcattaatcttttctgtactcagattcagtttctcatcttttacttgattgattatttcaaagactaacttataatcctttttatttattctctcgttagccttaagaaaactagatacaaaatttgcatctacatcatccgtggatatttgatttttttccatgatatccaagagttccgagataatttctccagaacattgatgagacaataatctccgcaatacatttctcaaatgaataagtttattagacacatggaagtttgactttttttgtacctttgtacatttttgaaataccgactcgcaaaaaatacaatattcatatccttgttcagatactataccgttgtgtctacaaccgctacataatcgtagattcatgttaacactctacgtatctcgtcgtccaatattttatataaaaacattttatttctagacgttgccagaaaatcctgtaatatttttagttttttgggctgtgaataaagtatcgccctaatattgttaccgtcttccgccaatatagtagttaaattatccgcacatgcaaaagaacaccgcttaggcggattcagtacaatgttatatttttcgtaccaactcatttaaatatcataatctaaaatagttctgtaatatgtctagcgctaatatattgatcataatcctgtgcataaattaagatacaacaatgtctcgaaatcatcgacatggcttcttccatagttagaagatcgtcgtcaaagttagcaacgtgattcatcaacatttgctgttttgaggcagcaaatactgaaccgtcgccattcaaccattcataaaaaccatcgtctgaatccattgataatttcttgtactggtttttgagagctcgcatcaatctagcatttctagctcccggattgaaaacagaaagaggatcgtacatccagggtccattttctgtaaatagaatcgtataatgtcccttcaagaagatatcagacgatccacaatcaaagaattggtctccgagtttgtaacaaactgcggactttaacctatacatgataccgtttagcatgatttctggtgatacgtcaatcggagtatcatctattagagatctaaagccggtgtaacattctccaccaaacatattcttattctgacgtcgttctacataaaacatcattgctccattaacgataacaggggaatgaacagcactacccatcacattagttcccaatggatcaatgtgtgtaactccagaacatcttccatatcctatgttaggaggagcgaacaccactcttccactattgccatcgaatgccatagaataaatatccttggaattgatagaaatcggactgtcggatgttgtgatcatcttcataggattaacaactatgtatggtgccgcctgaagtttcatatcgtaactgatgccgtttataggtctagccacagaaaccaacgtaggtctaaatccaactatagacaaaatagaagccaatatctgttcctcatctgtcataacttgagagcatccagtatgaataatcttcattagatggggatctaccgcatcatcatcgttacaataaaaaattcccattctaatgttcataattgcttttctaatcatggtatgcatgtttgctctctgaatctctgtggaaattagatctgatacacctgtaatcactatcggattatcctccgtaagacgattaaccaacaacatataattataagactttacttttctaaattcataaagttgctggattaggctataggtgtctccatgtacatacgcgttctcgagcgcaggaagtttaataccgaatagtgccatcagaataggatgaatatagtaattagtttctggttttctataaataaaagacaaatcttgtgaactagacatatcggtaaaatgcatggattggaatcgtgtagtcgacagaagaatatgatgattagatggagagtatattttatctaactctttgagttggtcaccgattctaggactagctcgagaatgaataagtactaaaggatgagtacatttcacagaaacactagcattgttcaatgtgctctttacatgggtaaggagttgaaatagctcgtttctatttgttctgacaatatttagtttattcataatgttaagcatatcctgaatagtaaagttagatgtgtcatacttgttagtagttagatatttagcaattgcattcccatcatttctcaatctcgtactccaatcatgtgtagatgctacttcgtcgatggaaaccatacaatcctttttgataggctgttgagattgattatttcctgcacgtttaggtttggtacgttgatttctagcccctgcggatataaagtcatcgtctacaatttgggacaatgaattgcatacactacaagacaaagatttatcagaagtgtgaatatgatcttcatctaccaaagaaagagtttgattagtataactagattttagtcctgcgttagatgttaaaaaaacatcgctattgaccacggcttccattatttatattcgtagtttttactcgaaagcgtgattttaatatccaatcttattacttttggaatcgttcaaaacctttgactagttgtagaatttgatctattgccctacgcgtatactcccttgcatcatatacgttcgtcaccagatcgtttgtttcggcctgaagttggtgcatatctctttcaacattcgacatgagatccttaagggccatatcgtctagattttgttgagatgctgctcctggatttggattttgttgtgctgttgtacatactgtaccaccagtaggtgtaggagtacatacagtggccacaataggaggttgaggaggtgtaaccgttggagtagtacaagaaatatttccatccgattgttgtgtacatgtagttgttggtaacgtctgagaaggttgggtagatggcggtgtcgtcgtcttttgatctttattaaatttagagataatatcctgaacagcattgctcggcgtcaacgctggaaggagtgaactcgccggcgcatcagtatcttcagacagccaatcaaaaagattagacatatcagatgatgtattagtttgttgtcgtggttttggtgtaggaacagtactactaggtagaagaataggagccggtgtagctgttggaaccggctgtggagttatatgaatagttggttgtagcggttggataggctgtctgctggcgaccgtcatattatctctagctagttgttctcgcaactgtctttgataatacgactcttgagactttagtcctatttcaatcgcttcatcctttttcgtatccggatccttttcttcagaataatagattgacgactttggtgtagaggattctgccagcccctgtgagaacttgttaaagaagtccatttaaggctttaaaattgaattgcgattataagattaaatggcagacacagacgatattatcgactatgaatccgatgatctcaccgaatacgaggatgatgaagaagaggaagaagatggagagtcactagaaactagtgatatagatcccaaatcttcttataagattgtagaatcagcatccactcatatagaagatgcgcattccaatcttaaacatatagggaatcatatatctgctcttaaacgacgctatactagacgtataagtctatttgaaatagcgggtataatagcagaaagctataacttgcttcaacgaggaagattacctctagtttcagaattttctgacgaaacgatgaagcaaaatatgctacatgtaattatacaagagatagaggagggttcttgtcctatagtcatcgaaaagaacggagaattgttgtcggtaaacgattttgacaaagatggtctaaaattccatctagactatattatcaaaatttggaaacttcaaaaacgatattagaatttatacgaatatcgttctctaaatgtcacaatcaagtctcgcatgttcagcaatttattgtcgtactttatatcgtgttcattaacgatatcttgcaaaatagtaatgattctatcttccttcgatagatattcttcagagattattgtcttatattttttcttgttatccgatatgaatttgataagactttgaacattattgatacccgtctgtttaattttttctacagatattttagttttggcagattctatcgtatctgtcaatagacatccaacatcgacattcgacgtcaattgtctataaatcaacgtataaattttagaaataacattagcgaattgttgtgcattgatgtcgttattctgaaacagtatgattttaggtagcattttcttaacaaagagaacgtatttattgttactcagttgaacagatgatatatccagattactaacgcatctgattccgtataccaaactttcagaagaaatggtgtacaattgtttgtattcattcaatgtctctttttcagaaattagtttagagtcgaatactgcaataattttcaagagatagttttcatcagataagattttatttagtgtagatatgataaaactattgttttgttggagaacttgatacgccgcgttctctgtagtcgacgctctcaaatgggaaacaatctccattatttttttggaatcggatactatatcttcggtatcttgacgcagtctagtatacatagagttaagagagattagagtttgtacattaagcaacatgtctctaaatgtggctacaaacttttcctttttcacataatctagtttattatataccgatttcacaacggcaccagatttaaggaaccagaatgaaaaactctgataactacaatatttcatcatagttacgattttatcatcttctatagttggtgtaatagcgcatacctttttctccaagactggaaccaacgtcataaaaatgtttaaatcaaaatccatatcaacatctgatgcgctaagaccagtctcgcgttcaagattatctttactaatggtgacgaactcatcatatagaactctaagtttgtccattatttatttacagatttagttgtttaatttatttgtgctcttccagagttgggatagtatttttctaacgtcggtattatattattaggatctacgttcatatgtatcataatattaatcatccacgttttgataaatctatctttagcttctgaaataacgtatttaaacaaaggagaaaaatatttagctacggcatcagacgcaataacattttttgtaaatgtaacgtatttagacgacagatcttcgttaaaaagttttccatctatgtagaatccatcggttgttaacaccattcccgcgtcagattgaataggagtttgaatagtttgttttggaaatagatccttcaataacttatagttgggtgggaaaaaatcgattttatcactagactctttcttttttactatcattacctcatgaactatttcttgaatgagtatatgtattttctttcctatatcggacgcgttcattggaaaatataccatgtcgttaactataagaatatttttatcctcgtttacaaactgaataatatcagatgtagttcgtaaacgaactatatcatcaccagcacaacatctaactatatgatatccactagtttcctttagccgtttattatcttgttccatattagcagtcattccatcatttaagaaggcgtcaaagataatagggagaaatgacattttggattctgttacgactttaccaaaattaaggatatacggacttactatctttttctcaacgtcgatttgatgaacacacgatgaaaatgtgcttctatgagattgatcatgtagaaaacaacaagggatacaatatttccgcatatcatgaaatatattaagaaatcccaccttattatatttccccaaaggatccatgcatgtaaacattatgccgttatcattaataaagacttctttctcatcggatttgtaaaagttgttactgatttttttcattccaggatctagataattaataatgatgggttttctattcttattctttgtattttggcatatcctagaccagtaaacagtttccactttggtaaaatcagcagacttttgaacgctattaaacatggcattaatggcaataactaaaaatgtaaaatatttttctatgttaggaatatggtttttcactttaatagatatatggtttttggccaaaatgatagatatttttttatccgaggatagtaaaatattattagtcgccgtctctataaaaatgaagctagtctcgatatccaattttattctagaattgataggagtcgccaaatgtaccttatacgttatatctcccttgatgcgttccatttgtgtatctatatcggacacaagatctgtaaatagttttacgttattaatcatcacggtatcgccgtcgctagataacgctaatgtaccatccaagtcccaaatggagagatttaactgttcatcgtttagaataaaatgattaccggtcatattaataaagtgttcatcgtatctagataacaacgacttataattaatgtccaagtcttgaactcgctgaatgatcttttttaacccagttagttttagattggtacgaaatatattgttaaactttgattctacagtaatgtccaaatctagttgtggaaatacttccatcaacattgtttcaaacttgataatattattatctacatcttcatacgatccaaattccggaatagatgtatcacatgctcttgccacccagataaccaaaaagtcacacgctccaggatatacattgtataaaaagctatcgttttttagtagtgtttttttctgagtatatacgaagggattaaaaatagtattatcaacgtaactatattccaaattattcttatgagaatagataataatatcgtccttaatatctaacaaatttcctaaatatccctttaattgagtcattcgaagcgtcaatagaatatgtctcttaactatttccggctgttgtatatttaaatgacttcgtaaaaaataatatatgggcgacttctcatctatgtaatcatatggagtgagatatagggctcgttctacctcctgccccttacccacctgtaataccaattgcggacttactatatatcgcatatttatatcgtggggtaaagtgaaaatctactaccgatgatgtaagtcttacaatgttcgaaccagtaccagatcttaatttggaggcctccgtagaactaggggaggtaaatatagatcaaacaacacctatgataaaggaaaatagcggttttatatcccgtagtagacgtctattcgcccatagatctaaggatgatgagagaaaactagcactacgattctttttacaaagactttattttttagatcatagagagattcattatttgttcagatgcgttgacgctgtaaaagacgtcactattaccaaaaaaaataacattatcgtggcgccttatatagcacttttaactatcgcatcaaaaggatgcaaacttacagaaacaatgattgaagcattttttccagaactatataatgaacatagtaagaaatttaaattcaactctcaagtatccatcatccaagaaaaactcggataccagtttggaaactatcacgtttatgattttgaaccgtattactctacagtagctctggctattcgagatgaacattcatctggcatttttaatatccgtcaagagagttatctggtaagttcattatctgaaataacatatagattttatctaattaatctaaaatctgatcttgttcaatggagtgctagtacgggcgctgtaattaatcaaatggtaaatactgtattgattacagtgtatgaaaagttacaactggtcatagaaaatgattcacaatttacatgttcattggctgtggaatcaaaacttccaataaaattacttaaagatagaaatgaattatttacaaaattcattaacgagttaaaaaagaccagttcattcaagataagcaaacgcgataaggatacgctactaaaatattttacttaggactggagttagaatttatagacgactcatttcgtttatcattgttactattattactattactatcattattagtgttggcattattagtattcttcttgtcatcttgttcagaaatatacagcaatgctatacctaatactaaatacattatcatgctcgcaatggctctaacaacaacgaaccaaaatgaatttggtcgtagcttttgttcacaaaaatacataaagaaatgtctacataaatctatggcgccattggctacttgaaatagcgccagtcctcctacagattttaatatagctgtataacatgacatttattcatcatcaaaagagacagagtcaccatctgtcatatttagattttttttcatgtgttcaaagtatcctctactcatttcattataatagtttatcatacttagaattttaggacggatcaatgagtaagacttgactagatcgtcagtagtaatttgtgcatcgtctattctgcatccgcttcgtcgaataatgtatagcatcgctttgagattctccatagctatcaagtctttatacaatgacatggaaatatctgtgaatactttatacttctccaacatcgatgccttaacatcatcgcctactttagcattgaaaatacgttctattgtgtagatggatgtagcaagatttttaaacaacaatgccatcttacacgatgattgcctcaagtctccaatcttttgtttagaacgattagctacagagttcaacgcttggctgactagcatattattatctttagaaattgtattcttcaatgaggcgtttatcatatctgtgatttcgttagtcatattacagtctgactgggttgtaatgttatccaacatatcacctatggatacggtacacgtaccagcatttgtaataatcctatctaagatgttgtatggcattgcgcagaaaatatcttctcctgtaatatctccactctcgataaatctactcagattattcttaaatgccttattctctggagaaaagatatcagtgtccatcatttcattaatagtatacgcagaaaagataccacgagtatcaattctatccaagatacttatcggttccgagtcacagataatggtttcctctccttcgggagatcctgcatagaaatatctaggacaatagtttctatactgtctgtaactctgataatctctaaagtcactaactgataccatgaaattgagaagatcaaacgctgaagtaatcaatttttctgcctcgtttttactacaactagttttcatcaatgtagcgacgatgtattgtttagttactcttggtctaatactgatgatagagatattattgcttcccataatggatcttctagtagtcaccttaaagcccattgatgcgaatagcagatagataaagtcttggtatgactcctttctaatatagtacggactacctttgtcacccaactttatacccacataagccataacaacctctttaatagccgtttcatgaggtttatcagccatgagcctgagtagttggaagaatctcatgaatcccgtctcagaaagtcctatatgcatgatagatttatctttcctgggaaactctcgtatagtcatagatgaaatactcttcaaagtttctgaaataagattagtaacagtcttacctccgactactctgggtaacaaacatactctaataggtgttttctctgcggagataatatcagaaaggatagagcaataagtagtattattgtgattataaagaccgaatacataacaggtagaatttataaacatcatgtcctgaaggtttttagacttgtattcctcgtaatccataccgtcccaaaacatggatttggtaactttgatagccgtagatctttgttccttcgccaacaggttaaagaaattaataaagaatttgttgtttctatttatgtccacaaattgcacgtttggaagcgccacggttacattcactgcagcattttgaggatcgcgagtatgaagtacgatgttattgtttactggtatatctggaaagaaatctaccagtctaggaataagagattgatatcgcatagaaatagtaaagtttataatctcatcatcgaagagcattttgttaccattgtaataaatatccactctgtcatatgtataaatgaagtactgttcaaacatgatgagatgtttatatgttggcatagtagtgagatcgacgtttggtaatggcaatgtattaagattaactccataatgtctagcagcatctgcgatgttataagcgtcgtcaaagcggggtcgatcttgtattgttatatattgtctaacacctataagattatcaaaatcttgtctgcttaatacaccgttaacaatttttgccttgaattcttttattggtgcattaataacatccttatagaggatgttaaacaaataagtgttatcaaagttaagatctggatatttcttttctgctagaacatccattgagtcggagccatctggtttaatataaccaccgataaatctagctctgtattctgtatccgtcaatctaatattaagaaggtgttgagtgaaaggtggaagatcgtaaaagctgtgagtattaatgataggattagtttccgaactaatgttaattggggtattaataatatctatatttccagcgttaagtgtaacattaaacagttttaattcacgtgacgtggtatcaattaaataattaatgcccaatttggatatagcagcctgaagctcatcttgtttagttacggatcctaatgagttattaagcaatatatcgaacggatgaacgaaggttgttttaagttggtcacatactttgtaatctagacatagatgcggaagaacggtagaaactatacgaaataaatattcagagtcctctaattgatcaagagtaactattgacttaataggcatcatttatttagtattaaatgacgaccgtaccagtgacggatatacaaaacgatttaattacagagttttcagaagataattatccatctaacaaaaattatgaaataactcttcgtcaaatgtctattctaactcacgttaacaacgtggtagatagagaacataatgccgccgtagtgtcatctccagaggaaatatcctcacaacttaatgaagatctatttccagatgatgattcaccggccactattatcgaacgagtacaacctcatactactattattgacgatactccacctcctacttttcgtagagagttattgatatcggaacaacgtcaacaacgagaaaaaagatttaatattacagtatcgaaaaatgctgaagcaataatggaatctagatctatgataacttctatgccaacacaaacaccatccttgggagtagtttatgataaagataaaagaattcagatgttggaggatgaagtggttaatcttagaaatcaacgatctaatacaaaatcatctgataatttagataattttaccaaaatactatttggtaagactccgtataaatcaacagaagttaataagcgtatagccatcgttaattatgcaaatttgaacgggtctcccttatcagtcgaggacttggatgtttgttcagaggatgaaatagatagaatctataaaacgattaaacaatatcacgaaagtagaaaacaaaaaattatcgtcactaacgtgattattattgtcataaacattatcgagcaagcattgctaaaactcggatttgaagaaatcaaaggactgagtaccgatatcacttcagaaattatcgatgtggagatcggagatgactgcgatgctgtagcatcaaaactaggaatcggtaacagtccggttcttaatattgtattgtttatactcaagatattcgttaaacgaattaaaattatttaatttaatacattcccatatccagacaacaatcgtctggattaatctgttcctgtcgtctcataccggacgacatattaatctttttattagtaggcatctttttagatggtttctttttcccagcattaactgagtcgatacctagaagatcgtgattgatctctccgaccattccacgaacttctaattggccgtctctaacggtaccataaactattttaccagcattagtaacagcttggacaatctgaccatccatcgcattgtacgatgtagtagtaactgttgttctacgtctaggagcaccagaagtatttttggagcccttggaggctgatgtagaagaagacgaggattttgattttggtttacatgtaatacattttgaactctttgattttgtatcacatgcgccggcagtcacatctgtttgagaattaagattattgttgcctcctttgacggctgcatctccaccgatttgcgctagtagatttttaagctgtggtgtaatcttattaactgtttcgatataatcatcgtaactgcttctaacggctaaattttttttatccgccatttagaagctaaaaatatttttatttatacagaagatttaactagattatacaatgaactaatatgatccttttccagattatttacaaacttggtattttttggttctggaggaggcgaatttaaattcggacttggattcggattttgtgagttcttgatcttattatacatcgagtataggatggcgacggtaactgctacacaaataccgatcaacaaaagaataccaatcatttattgacaataacttcactattgatcaagtatgcaatatatcatcttttcactaaataagtagtaataatgattcaacaatgtcgagatatatggacgataataatttagttcatggaaatatcgctatgattggtatgaatgactccgctaactctgtggggcgcgcagtgctttccccacatagaataaattagcattccgactgtgataataataccaagtataaacgccataatactcaatactttccatgtacgagtgggactggtagacttactaaagtcaataaaggcgaagatacacgaaagaatcaaaagaatgattccagcgattagcacgccggaaaaataatttccaatcataagcatcatgtccatttaactaataaaaattttaaatcgccgaatgaacaaagtggaatataaaccatataaaaacaatagtttgtactgcaaaaataatatctatttttgttttcgaagatatggtaaaattaaatagtagtacacagcatgttataactaacagcagcaacggctcgtaattacttatcatttactagacgaaaaggtggtgggatattttcttgctcaaataatacgaatatatcacccatccattttatgcgatgtttatatactctaatctttaatagatctatagacgacgggtttaccaacaatatagattttatcgattcatctaatttaaacccttccttaaacgtgaatgatctattatctggcataacgatgaccctacctgatgaatcggacaatgtactgggccatgtagaataaattatcaacgaattatcgtctacgaacatttatatcatttgttttaattttaggacgcgaataaatagatataaaatagaaaataacagatattacaaccagtgttatggccgcgcccaaccaggtaggcagttttattttatcttttactacaggttctcctggatgtacgtcaccaacggcggacgtagttctagtacaattagacgtaagttccgcttgggaattttttaacgctaaagagttaacgttaatcgtgcacccaacgtatttacatctagttctttgaacatcttgattataatataaccattttctatctctagattcgtcggtgcactcatgtaaccaacataccctaggtcctaaatatttatctccggaattagattttggataattcgcgcaccaacaatttctatttcctttatgatcgttacaaaagacgtataatgccgtatccccaaaagtaaaataatcaggacgaataattctaataaactcagaacaatatctcgcatccatatgtttggagcaaatatcggaataagtagacatagccggtttccgttttgcacgtaaccattctaaacaattggggtttccaggatcgtttctacaaaatccagtcatgaaatcgtcacaatgttctgtcttgtaattattattaaatatttttggacagtgtttggtatttgtcttagaacaacattttgccacgctatcactatcgcccaggagataatccttttttataaaatgacatcgttgcccggatgctatataatcagtagcgtgttttaaatccttaatatattcaggagttacctcgttctgataatagattaatgatccaggacgaaatttgaaagaactacatggttctccatgaattaatacatattgtttagcaaattcaggaactataaaactactacaatgatctatcgacataccatctatcaaacaaaacttgggtttaatttctcccggagatgtttcataatagtacgtataactttcttctgcaaacttaacagctctattatattcaggataattaaaacctaattccatatatttgtctcgtatatctgctattcctggtgctattttgattctattaagagtaacagctgcccccattcttaataatcgtcagtatttaaactgttaaatgttggtatatcaacatctaccttatttcccgcagtataaggtttgttgcaggtatactgttcaggaatggttacatttatacttcttctatagtcctgtctttcgatgttcatcacatatgcaaagaacagaataaacaaaataatgtaagaaataatattaaatatctgtgaattcgtaaatacattgattgccataataattacagcagctacaatacacacaatagacattcccacagtgttgccattacctccacgatacatttgagttactaagcaataggtaataactaagctagtaagaggcaatagaaaagatgagataaatatcatcaatatagagattagaggagggctatatagagccaagacgaacaaaatcaaaccgagtaacgttctaacatcattatttttgaagattcccaaataatcattcattcctccataatcgttttgcatcatacctccatctttaggcataaacgattgctgctgttcctctgtaaataaatctttatcaagcactccagcacccgcagagaagtcgtcaagcatattgtaatatcttaaataactcatttatatattaaaaaatgtcactattaaagatggagtataatctttatgccgaactaaaaaaaatgacttgtggtcaacccctaagtctttttaacgaagacggggatttcgtagaagttgaaccgggatcatcctttaagtttctgatacctaagggattttacgcctctccttccgtaaagacgagtctagtatttgaaacattaacaacgaccgataataaaatcactagtatcaatccaacaaatgcgccaaagttatatcctcttcaacgcaaagtcgtatctgaagtagtttctaatatgaggaaaatgatcgaatcaaaacgtcctctatacattactcttcacttggcgtgtggatttggtaagactattaccacgtgttatcttatggctacacacggtagaaaaaccgtcatttgcgtacccaataaaatgttaatacatcaatggaagacacaggtagaggcagtcggattggaacataagatatccatagatggagtaagtagtctattaaaggaactaaagactcaaagtccggatgtattaatagtagtcagtagacatctgacaaacgatgccttttgtaaatatatcaataagcattatgatttgttcatcttggatgaatcacatacgtataatctgatgaacaatacagcagttacaagatttttagcgtattatcctccgatgatgtgttattttttaactgctacacctagaccagctaaccgaatttattgtaacagtattattaatattgccaagttatccgatctaaaaaaaactatctatgcggtagatagtttttttgagccatattccacagacaatattagacatatggtaaaacgactagatggaccatctaataaatatcatatatataccgagaagttattatctgtagacgagcctagaaatcaacttattcttaataccctggtagaagaattcaagtcaggaactattaatcgcattttagttattactaaactacgtgaacatatggtattattctacaaacgattattagatcttttcggaccagaggttgtatttataggagacgcccaaaatagacgtactccagatatggtcaaatcaatcaaggaactaaatagatttatattcgtatccaccttattttattccggtactggtttagatattcctagtttggattcgttgttcatttgctcggcagtaatcaacaatatgcaaatagagcaattactagggagggtatgtcgagaaacagaactattagataggacggtatatgtatttcctaacacatccatcaaagaaataaagtacatgataggaaatttcatgcaacgaattattagtctgtctgtagataaactaggatttaaacaagaaagttatcggaaacatcaagaatccgatcccacttctgtatgtacaacatcctccagagaagaacgtgtattaaatagaatatttaactcgcaaaatcgttaagaagtttaagcgacgatccgcatgctgcgcaggccagtgtattacccctcatagtattaatataatccaatgatacttttgtgatgtcggaaatcttaaccaatttagactgacaggcagaacacgtcatgcaatcatcatcgtcatcgataactgtagtcttgggcttctttttgcggctcttcattccggaacgcacattggtgctatccatttaggtagtaaaaaataagtcagaatatgccctataacacgatcgtgcaaaacctggtatatcgtctctatctttatcacaatatagtgtatcgacatctttattattattgacctcgtttatcttggaacatggaatgggaacatttttgttatcaacggccacctttgccttaattccagatgttgtaaaattataactaaacagtctatcatcgacacaaatgaaattcttgtttagacgtttgtagtttacgtatgcggctcgttcgcgtctcattttttcagatattgcaggtactataatattaaaaataagaatgaaataacataggattaaaaataaagttatcatgacttctagcgctgatttaactaacttaaaagaattacttagtctgtacaaaagtttgaaattttcagattctgcggctatagaaaagtataattctttggtagaatggggaacatctacttactggaaaataggcgtgcaaaaggtagctaatgtcgagacgtcaatatctgattattatgatgaggtaaaaaataaaccgtttaatattgatccgggctattacattttcttaccggtatattttgggagcgtctttatttattcgaagggtaaaaatatggtagaacttggatctggaaactcttttcaaataccagatgatatgcgaagtgcgtgtaacaaagtattagacagcgataacggaatagactttctgagatttgttttgttaaacaatagatggataatggaagatgctatatcaaaatatcagtctccagttaatatatttaaactagctagtgagtacggattaaacatacccaaatatttagaaattgaaatagaggaagacacattatttgacgacgagttatactctattatagaacgctcttttgatgataaatttccaaaaatatccatatcgtatattaagttgggagaacttaggcggcaagttgtagactttttcaaattctcgttcatgtatattgagtccatcaaggtagatcgtataggagataatatttttattcctagcgttataacaaaatcaggaaaaaagatattagtaaaagatgtagaccatttaatacgatctaaggttagagaacatacatttgtaaaagtaaaaaagaaaaacacattttccattttatacgactatgatgggaacggaacagaaactagaggagaagtaataaaacgaattatagacactataggacgagactattatgttaacggaaagtatttctctaaggttggtagtgcaggcttaaagcaattgactaataaattagatattaatgagtgcgcaactgtcgatgagttagttgatgagattaataaatccggaactgtaaaacgaaaaataaaaaaccaatcagcatttgatttaagcagagaatgtttgggatatccagaagcagattttataacgttagttaataacatgcggttcaaaatagaaaattgtaaggttgtaaatttcaatattgaaaatactaattgtttaaataacccgagtattgaaactatatatggaaactttaaccagttcgtctcaatctttaatatcgtcaccgatgtcaaaaaaagattattcgagtgaaataatatgcgcctttgatataggtgcaaaaaatcctgccagaactgttttagaagtcaaggataactccgttagggtattggatatatcaaaattagactggagttctgattgggaaaggcgcatagctaaagatttgtcacaatatgaatacactacagttcttctagaacgtcagcctagaaggtcgccgtatgttaaatttatctattttattaaaggctttttatatcatacatcggctgccaaagttatttgcgtctcgcctgtcatgtctggtaattcatatagagatcgaaaaaagagatcggtcgaagcatttcttgattggatggacacattcggattgcgagactccgttccggatagacgcaaattagacgatgtagcggatagtttcaatttggctatgagatacgtattagataaatggaatactaattatacaccttataataggtgtaaatctagaaattacataaaaaaaatgtaataacgttagtaacgccattatggataatctatttacctttctacatgaaatagaagatagatatgccagaactatttttaactttcatctaataagttgcgatgaaataggagatatatatggtcttatgaaagaacgcatttcctcagaggatatgtttgataatatagtatataataaagatatacatcctgccattaagaaactagtgtattgcgacatccaacttactaaacacattattaatcagaatacgtatccggtatttaacgattcttcacaagtgaaatgttgtcattatttcgacataaactcagataatagcaatattagctctcgtacagtagagatatttgagagggaaaagtcatctcttgtatcatatattaaaactaccaataagaagagaaaggtcaattacggcgaaataaagaaaactgttcatggaggcactaatgcaaattacttttccggtaaaaagtctgacgagtatctgagtactacagttagatccaacattaatcaaccttggatcaaaaccatttctaagagaatgagagtagatatcattaatcactctatagtaacgcgtggaaaaagctctatattacaaactatagaaattatttttactaatagaacatgtgtgaaaatattcaaggattctactatgcacattattctatccaaggacaaggatgaaaaggggtgtatacacatgattgacaaattattctatgtctattataatttatttctgttgttcgaagatatcatccaaaacgagtactttaaagaagtagctaatgttgtaaaccacgtacttacggctacggcattagatgagaaattattcctaattaagaaaatggctgaacacgatgtttatggagttagcaatttcaaaatagggatgtttaacctgacatttattaagtcgttggatcataccgttttcccctctctgttagatgaggatagcaaaataaagttttttaaggggaaaaagctcaatattgtagcattacgatctctggaggattgtataaattacgtgactaaatccgagaatatgatagaaatgatgaaggaaagatcgactattttaaatagcatagatatagaaacggaatcggtagatcgtctaaaagaattgcttctaaaatgaaaaaaaacactgattcagaaatggatcaacgactagggtataagtttttggtgcctgatcctaaagccggagttttttatagaccgttacatttccaatatgtatcgtattctaattttatattgcatcgattgcatgaaatcttgaccgtcaagcggccactcttatcgtttaagaataatacagaacgaattatgatagaaattagcaatgttaaagtgactcctccagattactcacctataatcgcgagtattaaaggtaagagttatgatgcattagccacgttcactgtaaatatctttaaagaggtaatgaccaaagagggtatatccatcactaaaataagtagttatgagggaaaagattctcatttgataaaaattccgctactaataggatacgggaataaaaatccacttgatacagccaagtatcttgttcctaatgtcataggtggagtctttatcaataaacaatctgtcgaaaaagtaggaattaatctagtagaaaagattacaacatggccaaaatttagggttgttaagccaaactcattcactttctcgttttcctccgtatcccctcctaatgtattaccgacaagatatcgccattacaagatatctctggatatatcacaattggaagcgttgaatatatcatcgacaaagacatttataacggtcaatattgttttgctgtctcaatatttatctagagtgagtctagaattcattagacgtagtttatcatacgatatgcctccagaagttgtctatctagtaaacgcgataatagatagtgctaaacgaattactgaatctattactgactttaatattgatacatacattaatgacctggtggaagctgaacacattaaacaaaaatctcagttaacgatcaacgagttcaaatatgaaatgctgcataactttttacctcatatgaactatacacccgatcaactaaagggattttatatgatatctttactaagaaagtttctctactgtatctaccacacttctagatatccagatagagattcgatggtttgtcatcgcatcctaacgtacggcaaatattttgagacgttggcacatgatgaattagagaattacataggcaacatccgaaacgatatcatgaacaatcacaagaacagaggcacttacgcggtaaacattcatgtactaacaactcccggacttaatcacgcgttttctagcttattgagtggaaagttcaaaaagtcagacggtagttatcgaacacatcctcactattcatggatgcagaatatttctattcctaggagtgttggattttatccggatcaagtaaagatttcaaagatgttttctgtcagaaaataccatccaagtcaatatctttacttttgttcatcggacgttccggaaagaggtcctcaggtaggtttagtatctcaattgtctgtcttgagttccattacaaatatactaacgtctgagtatttggatttggaaaagaaaatttgtgagtatatcagatcatattataaagatgatataagttactttgaaacaggatttccaatcactatagaaaatgctctagtcgcatctcttaatccaaatatgatatgtgattttgtaactgactttagacgtagaaaacggatgggattcttcggtaacttggaggtaggtattactttagttagggatcacatgaatgaaattcgcattaatattggagcgggaagattagtcagaccattcttggttgtggataacggagagctcatgatggatgtgtgtccggagttagaaagcagattagacgacatgacattctctgacattcagaaagagtttccgcatgtcatcgaaatggtagatatagaacaatttacttttagtaacgtatgtgaatcggttcaaaaatttagaatgatgtcaaaggatgaaagaaagcaatacgatttatgtgactttcctgccgaatttagagatggatatgtggcatcttcattagtgggaatcaatcacaattctggacccagagctattcttggatgtgctcaagctaaacaagctatctcttgtctgagttcggatatacgaaataaaatagacaatggaattcatttgatgtatccagagaggccaatcgtgattagtaaggctttagaaacttcaaagattgcggctaattgcttcggccaacatgttactatagcattaatgtcgtacaaaggtatcaatcaagaggatggaattatcatcaaaaaacaatttattcagagaggcggtctcgatatagttaccgcaaagaaacatcaagtagaaattccgttggaaaactttaataacaaagaaagagataggtctaacgcctattcaaaattagaaagtaatggattagttagactgaatgctttcttggaatccggagacgctatggcacgaaatatctcatcaagaactcttgaagatgattttgctagagataatcagattagcttcgatgtttccgagaaatataccgatatgtacaaatctcgcgttgaacgagtacaagtagaacttactgacaaagttaaggtacgagtattaaccatgaaagaaagaagacccattctaggagataaatttaccactagaacgagtcaaaagggaacagtcgcgtatgtcgcggatgaaacggaacttccatacgacgaaaatggtatcacaccagatgtcattattaattctacatccatcttctctagaaaaactatatctatgttgatagaggttattttaacagccgcatattctgctaagccgtacaacaataagggagaaaaccgacctgtctgttttcctagtagtaacgaaacatccatcgatacatatatgcaattcgctaaacaatgttatgagcattcaaatccgaaattgtccgatgaagaattatcggataaaatcttttgtgaaaagattctctatgatcctgaaacggataagccttatgcatccaaagtattttttggaccaatttattacttgcgtctgaggcatttaactcaggacaaggcaaccgttagatgtagaggtaaaaagacgaagctcattagacaggcgaatgagggacgaaaacgtggaggaggtatcaagttcggagaaatggagagagactgtttaatagcgcatggcgcagccaatactattacagaagttttaaaagactcagaagaggattatcaagatgtgtatgtttgtgaaaattgtggagacatagcagcacaaatcaagggtattaatacatgtcttagatgttcaaaacttaatctctctcctctcttaacaaaaattgataccacgcacgtatctaaagtatttcttactcaaatgaacgccagaggcgtaaaagtcaaattagatttcgaacgaaggcctccttcgttttataaaccattagataaagttgatctcaagccgtcttttctggtgtaatattctagtttggtagtagatacatatcaatatcatcaaattcgagatccgaattataaaatgggcgtggattgttaactatagaatcggacgtctgatattcgaaaatctgtggagttttaggttttggtggaggtgtaactgctacttgggatactgaagtctgatattcagaaagctgggggatgttctggttcgacatccaccgatggtgtcacatcactaatcggttcggtaacgtctgtggatggaggtgctacttctacagaacctgtagcctcagttgtcaacggagatacatttttaatgcgaggaaatgtataatttggtaatggtttctcatgtggatctgaagaagaggtaagatatctactagaaagataccgatcacgttctagttctcttttgtagaacttaactttttctttctcagcatctagttgatattccaacctcttcacgttactacgttcagattccaattcacgttcgcatgggttacctccgcagtttttacgagcgatttcacgttcagccttcatgcgtctctccttctctctatcgagtttatcagagcagtctttctgaaggcgatcgaactccataaatttctccaacgctttgattgtttccatagatttccgaagttcagcttttaggactgtgattctttttctttcgaattcacagctggatgtgcaaccgtttccattaccgccatctctaagtttcttttctagatcggcaacatttcatccccatgccttttacattcctcgagtctactgtcgtcgaaatatcgttccagctccttttcgacatcaataactttagcacgttgtctctcaagctctcttttgtagttatctgattccctggcacgtttaagatcttcatgcaattgagtcagctcttaacacaatctcttgcttcttcgtcatagtacttacaatcactatgggatccattgttaccacgtctacactcggcgagctcgcgtttaagagattcaatttcccgtttgtattggtccatgtttccattgctaccaccattagatttacaggctgctagttgtcgttcgagatcagaaatacgggttttcttggaattgatttcgtcgatgtacttggcatcgaaacacttattaagttctttttccaattctacgattttatttctttcgcgagtcaattccctcctgtagtaactatctgttttgtcagattcacgctctctacgtagactttcttgcaagttactaatttgttccctagcacgtccgagtttagttttatatgctgaatagagttctgattcatcctttgagcagatctctagcgatcgtttaagattcctgattctagtctttagcctatttacctcctcagaagatgttccgttaccgttgcgtttacactcgttaagctgtctatcaagatccatgattctatctctaagacgttgcatctctctttccatatcagcattgctttcattattacgtctgcagtcactcaactgtctttcaatatctgagattctatctctaagacgtcgcatctctctctgtttcggcattggtttcattattacgtctacagtcgttcaactgtctttcaagatctgatattctagattggagtctgctaatctctgtagcattttcacggcattcactcagttgtctttcaagatctgagattttagattggagtctgctaatctctgtaagatttcctcctccgctctcgatgcagtcggtcaacttattctctagttctctaatacgcgaacgcagtgcatcaacttcttgcgtgtcttcctggttgcgtgtacattcatcgagtctagattcgagatctctaacgcgtcgtcgttcttcctcaagttctctgcgtactacagaaagcgtgtccctatcttgttgatatttagcaatttctgattctagagtactgattttgcttacgtagttactaatagttgtcttggccttatcaagatcctccttgtatttgtcgcattccttgatatccctacgaagtctggacagttcccattcgacattacgacgtttatcgatttcagctcggagatcgtcatcgcgttgttttagccacatacgactgagttcaagttctcgttgacaagatccatctacttttccattcctaatagtatccagttccttttctagttctgaacgcatttctcgttccctatcaagcgattctctcaattctcggatagtcttcttatcaatttctaataaatctgaaccatcatctgtcccattttgaatatccctgtgttctttgatctcttttgtaagtcggtcgattctttcggttttataaacagaatccctttccaaagtcctaatcttactgagtttatcactaagttctgcattcaattcggtgagttttctcttggcttcttccaactctgttttaaactctccactatttccgcattcttcctcgcatttatctaaccattcaattagtttattaataactagttggtaatcagcgattcctatagccgttcttgtaattgtgggaacataattaggatcttctaatggattgtatggcttgatagcatcatctttatcattattagggggatggacaaccttaattggttggtcctcatctcctccagtagcgtgtggttcttcaataccagtgttagtaataggcttaggcaaatgcttgtcgtacgcgggcacttcctcatccatcaagtatttataatcgggttctacgtctgaatattcttttctaagagacgcgacttcgggagttagtagaagaactctgtttctgtatctatcaacgctggaatcaatactcaagttaaggatagcgaatacctcatcgtcatcatccgtatcttctgaaacaccatcatatgacatttcatgaagtctaacgtattgataaatagaatcagatttagtattaaacagatccttaacctttttagtaaacgcatatgtatattttagatctccagatttcataatatgatcacatgccttaaatgtcagtgcttccatgatataatctggaacactaatgggtgacgaaaaagatacagcaccatatgctacgttgataaataaatctgaaccactaagtagataatgattaatgttaaggaagaggaaatattcagtatatagatatgccttagcatcatatcttgtactaaacacgctaaacagtttattgatgtgatcaatttccaacagaataattagagcagcgggaataccaacaaacatattaccacatccgtattttctatgaatatcacatatcatgttaaaaaatcttgatagaagagcgaatatctcgtctgacttaatgagtcgtagttcagcagcaacataagtcataactgtaaatagaacatactttcctgtagtgttgattctagactccacatcaacaccattattaaaaatagttttatatacatctttaatctgctctccgttaatcgtcgaacgttctagtatacggaaacactttgatttcttatctgtagttaatgacttagtgatatcacgaagaatattacgaattacatttcttgtttttcttgagagacctgattcagaactcaactcatcgttccatagtttttttacctcagtggcgaaatctttggagtgcttggtacatttttcaataaggttcgtgacctccatttattataaaaaattttattcaaaacttaactacaatcgggtaattataaaatcgtagatctcccatgtggtggaatactaccatctatcgcatgtggatggacagtaggtaatggccatgggaacagtaatgtttgcatatttatctttcttgccagtattactgcatattgtcccaatgtttcgatgtgatgttctaacctatcaactgccgctgtatcacaacaatagtgtccgatgaaattaagattatgatccaatgtgtttaatatatgattatcaagtcttatacgatccgcgtcttttttgacaggatcaggttcttctacaggaagaagtttcggcctcttatgatattcatgtctgggaaacggtggtctagggtgaggctccggtatcggagtgggttttggattataatcatcatcgtctatgacatcatcttcgacttcgatatttattttgctatcttgatgatgtcctgtatcagttgcattttcagcactcgactgaatattagcgcattcattgtctattattaccatatttctaaacccaaaatgtatgtgttgaacatcagtactatcgttgatgagtcttatagcatgaattcgcttatcgttatcgggtttatcttctgtcaccttagcaattccttttttattaaactctacataatcatatccatttctattgtttgttctaatataaacgagtatagcatcattgctaaatttttcaatagtatcgaaaacagaatatcctaaaccatataatatatattcagggacactcaaactaaatgtccaggattctcctaaatacgtaaactttaatagtgcgaaatcattcaaaaatctaccacttatagatagatagtacataaatgcgtatagtagtctacctatctctttattatgaaaaccggcattacgatcatatatgtcgtgatatacctgtgatccgtttacgttaaaccataaatacatgggtgatcctataaacatgaatttatttctaattctcagagctatagttaattgaccgtgtaatatttgcttacatgcatacttgatacgctcattaataaaatttttatcattgctcgttatctcagaatcgtatatataaggagtaccatcgtgattcttaccagatattatacaaaatactatatataaaatatattgaccaacgttagtaatcatataaatgtttaacgttttaaattttgtattcaatgatccattatcatacgctagcatggtcttatgatattcattctttaaaatataatattgtgttagccattgcattggggctcctaatggagattttttattctcatccattttaggataggctttcataaagtccctaataacttcgtgaataatgtttctatgttttctactgatgcatgtatttgcttcgatttttttatcccatgtttcatctatcatagatttaaacgcagtaatgctcgcaacattaacatcttgaaccgttggtacaattccgttccataaatttataatgttcgccatttatataactcattttttgaatatacttttaattaacaaaagagttaagttactcatatgggcgccgtccagtctgaacatcaatctttttagccagagatatcatagccgctcttagagtttcagcgtgattttccaacctaaatagaacttcatcgttgcgtttacaacacttttctatttgttcaaactttgttgttacattagtaatctttttttccaaattagttagccgttgtttgagagtttcctcattgtcgtcttcatcggctttaacaattgcttcgcgtttagcctctggctttttagcagcctttgtagaaaaaaattcagttgctggaattgcaagatcgtcatctccggggaaaagagttccgtccatttaaagtacagattttagaaactgacactctgcgttatttatatttggtacaacacatggattataaatatcgatgttaataacatcagaaaatgtaaagtctatacattgttgcatcgtgttaaattttctaatggatctagtattattgggtccaacttctgcctgaaatccaaatatggaagcggatacaaaaccgtttcctggataaaccacacatctccacttttgctttacatcagaaattgtgtcgttgacatcttgaactctcctatctaatgccggtgttccacctatagattttgaatattcgaatgctgcatgagtagcattaaattccttaatattgccataattttcatatattgagtaaccctggataaaaagtaaacacaccgcagccgtcgctaccacaataaaaaaaattgatagagagttcatttataatctattagaagctgacaaaatttttttacacgcatcagacaatgctttaataaatagttcaacatctacttttgtcatatcgaaccgatggtatgattctaacctagaattacatccgaaaaagttgactatgttcatagtcattaagtcattaacaaacaacattccagactctggattataagacgatactgtttcgtcacaattacctaccttaatcatgtgattatgaatattggctattagagcaccttctaagaaatctataatatctttgaaacacgatttaaaatcaaaccacgaatatacttctacgaagaaagttagtttacccataggagaaataactataaatggagatctaaatacaaaatccggatctatgatagttttaacattattatattctctattaaatacctccacatctaaaaatgttaattttgaaactatgtcttcgtttattaccgtacctgaactaaacgctataagctctattgtttgagaactctttaaacgatattcttgaaatacatgtaacaaagtttcctttaactcggtcggtttatctaccatagttacagaatttgtatccttatctataatataataatcaaaatcgtataaagttatataattatcgcgttcagattgggatcttttcaaatagactaaaaaccccatttctctagtaagtatcttatgtatatgtttgtaaaatatcttcatggtgggaatatgctctaccgcagttagccattcctcattgacagcggtagatgtattagacaaaactattccaatgtttaacaagggccattttacgagattattaaatccttgtttgataaatgtagccaatgagggttcgagttcaacgacgattgaattctcttcccgcggatgctgcatgatgaacgacgggatgttgttcgattgatttggaattctttttcgactttttgtttatattaaatattttaaaatttatagcggatagcaattcatgtaccacggataatgtagacgcgtattgcgcatcgatatctttattattagataaatttatcaataaatgtgagaagtttgcctcgttaaggtcttccatttaaatattatataaacatttgtgtttgtatcttattcgtcttttatggaatagttttttactagtaaagctgcaattacacactttgtccgtaaaacataaatataaacaccagcttttatcaatcgttccaaaaagtcgacggcggacatttttaacatggcatctattttaaatacacttaggtttttggaaaaaacatcattttataattgtaacgattcaataactaaagaaaagattaagattaaacataagggaatgtcatttgtattttataagccaaagcattctaccgttgttaaatacttgtctggaggaggtatatatcatgatgatttggttgtattggggaaggtaacaattaataatctaaagatgatgctattttacatggatttatcatatcatggagtgacaagtagtggagcaatttacaaattgggatcgtctatcgatagactttctctaaataggactattgttacaaaagttaataattatgatgatacattttttgacgacgatgattgatcgctattgcacaattttgtttttttactttctaatatagcgtttagattctttttcatgtgcgaatattgatttactaaaatatcgatgtttaacttttgttctatgacgtccttatcagcggtatcggtacatatacgtaattcaccttcacaaaatacggagtcttcgataataatagccaatcgattattggatctagctgtctgtatcatattcaacatgtttaatatatcctttcgtttcccctttacaggcatcgatcgtagcatattttccgcgtctgagatggaaatgttaaaactacaaaaatgcgtaatgttagcccgtcctaatattggtacgtgtctataagtttggcatagtagaataatagacgtgtttaaatgccttccaaagtttaagaattctattagagtattgcattttgatagtttatcacctacatcatcaaaaataagtaaaaagtgtgctgattttttatgattttgtgcgacagcaatacatttttctatgttacttttagttcgtatcagattatattctagagattcctgactactaacgaaattaatatgatttggccaaatgtatccatcataatctgggttataaacgggtgtaaacaagaatatatgtttatattttttaactagtgtagaaaacagagatagtaaatagatagtttttccagatccagatcctcccgttaaaaccattctaaacggcatttttaataaattttctcttgaaaattgtttttcttggaaacaattcataattatatttacagttactaaattaatttgataataaatcaaaatatggaaaactaaggtcgttagtagggaggagaacaaagaaggcacatcgtgacataaataacatttattatcatgatgacaccagaaaacgacgaagagcagacatctgtgttctccgctactgtttacggagacaaaattcaaggaaagaataaacgcaaacgcgtgattggtctatgtattagaatatctatggttatttcactactatctatgattaccatgtccgcgtttctcatagtgcgcctaaatcaatgcatgtctgctaacgaggctgctattactgacgccgctgttgccgttgctgctgcatcatctactcatagaaaggttgcgtctagcactacacaatatgatcacaaagaaagctgtaatggtttatattaccagggttcttgttatatattacattcagactaccagttattctcggatgctaaagcaaattgcactgcggaatcatcaacactacccaataaatccgatgtcttgattacctggctcattgattatgttgaggatacatggggatctgatggtaatccaattacaaaaactacatccgattatcaagattctgatgtatcacaagaagttagaaagtatttttgtgttaaaacaatgaactaatatttatttttgtacattaataaatgaaatcgcttaatagacaaactgtaagtaggtttaagaagttgtcggtgccggccgctataatgatgatactctcaaccattattagtggcataggaacatttctgcattacaaagaagaactgatgcctagtgcttgcgccaatggatggatacaatacgataaacattgttatttagatactaacattaaaatgtctacagataatgcggtttatcagtgtcgtaaattacgagccagattgcctagaccggatactagacatctgagagtattgtttagtattttttataaagattattgggtaagtttaaaaaagaccaatgataaatggttagatattaataatgataaagatatagatattagtaaattaacaaattttaaacaactaaacagtacgacggatgctgaagcgtgttatatatacaagtctggaaaactggttaaaacagtatgtaaaagtactcaatctgtactatgtgttaaaaaattctacaagtgacaacaaaaaatgaattaataataagtcgttaacgtacgccgccatggacgccgcgtttgttattactccaatgggtgtgttgactataacagatacattgtatgatgatctcgatatctcaatcatggactttataggaccatacattataggtaacataaaaactgtccaaatagatgtacgggatataaaatattccgacatgcaaaaatgctactttagctataagggtaaaatagttcctcaggattctaatgatttggctagattcaacatttatagcatttgtgccgcatacagatcaaaaaataccatcatcatagcatgcgactatgatatcatgttagatatagaagataaacatcagccattttatctattcccatctattgatgtttttaacgctacaatcatagaagcgtataacctgtatacagctggagattatcatctaatcatcaatccttcagataatctgaaaatgaaattgttgtttaattcttcattctgcatatcagacggcaatggatggatcataattgatgggaaatgcaatagtaattttttatcataaaagttgtaaagtaaataataaaacaataaatattgaactagtagtacgtatattgagcaatcagaaatgatgctggtacctcttatcacggtgaccgtagttgcgggaacaatattagtatgttatatattatatatttgtaggaaaaagatacgtactgtctataatgacaataaaattatcatgacaaaattaaaaaagataaagagttctaattccagcaaatctagtaaatcaactgatagcgaatcagactgggaggatcactgtagtgctatggaacaaaacaatgacgtagataatatttctaggaatgagatattggacgatgatagcttcgctggtagtttaatatgggataacgaatccaatgtcatggcgcctagcacagaacacatttacgatagtgttgctggaagcacgctgctaataaataatgatcgtaatgaacagactatttatcagaacactacagtagtaattaatgagacggagactgttgaagtacttaatgaagataccaaacagaatcctaactattcatccaatcctttcgtaaattataataaaaccagtatttgtagcaagtcaaatccgttcattacagaactcaacaataaatttagtgagaataatccgtttagacgagcacatagcgatgattatcttaataagcaagaacaagatcatgaacacgatgatatagaatcatcggtcgtatcattggtgtgattagtttcctttttataaaattgaagtaatatttagtattattgctgccgtcacgttgtacaaatggagatattccctgtattcggcatttctaaaattagcaattttattgctaataatgactgtagatattatatagatacagaacatcaaaaaattatatctgatgagatcaatagacagatggatgaaacggtacttcttaccaacatcttaagcgtagaagttgtaaatgacaatgagatgtaccatcttattccccatagactatcgactattatactctgtattagttctgtcggaggatgtgttatctctatagataatgacatcaatgacaaaaatattctaacatttcccattgatcatgctgtaatcatatccccactgagtaaatgtgtcgtagttagcaagggtcctacaaccatattggttgttaaagcggatatacccagcaaacgattggtaacatcgtttacaaacgacatactgtatgtaaacaatctgtcactgattaattatttgccgttgtctgtattcattattagacgagtcaccgactatttggatagacacatatgcgatcagatatttgcgaataataagtggtattccattataaccatcgacgataagcaatatcctattccatcaaactgtataggtatgtcctctgccaagtacataaattctagcatcgagcaagatactttaatacatgtttgtaacctcgagcatccattcgacttagtatacaaaaaaatgcagtcgtacaattctgtacctatcaaggaacaaatattgtacggtagaattgataatataaatatgagcattagtatttctgtggattaatagatttctagtatggggatcattaatcatctctaatctctaaatacctcataaaacgaaaaaaaagctattatcaaatactgtacggaatggattcattctcttctctttttatgaaactctgttgtatatctactgataaaactggaagcaaaaaatctgataaaaagaataagaataagatcaaggattatatggaacacgattattataaaataacaatagttcctggttcctcttccacgtctactagctcgtggtattatacacatgcctagtaatagtctctttgcgttgacggaaagcagactagaaataacaggctaaaatgttcagacaccataatagttcccaacccagataataacagagtaccatcaacacattcctttaaactcaatcccaaacccaaaaccgttaaaatgtatccggccaattgatagtagataatgaggtgtacagcgcatgataatttacacagtaaccaaaatgaaaatactttagtaattataagaaatatagatggtaacgtcatcatcaacaatccaataatatgccggagagtaaacattgacggataaaacaaaaatgctccgcataactctatcatggcaataacacaaccaaatacttgtaagattcctaaattagtagaaaatacaacggatatcgatgtataagtgatctcgagaaataataagaataaagtaatgcccgtaaagataaacatcaacattgtttggtaatcattaaaccaattagtatgaagttgaactaatttcacagtagattttattccagtgttatcctcgcatgtatacgtacctggtaagatatctttatattctataatcaatgagacatcactatccgataacgaatgaagtctagcactagtatgccatttacttaatatggtcgtcttggaagttttattataagttaaaatatcatggttgtccaatttccatctaatatactttgtcggattatctatagtacacggaataatgatggtattattacatgctgtatactctatagtctttgtagatgttataatcataaaagtacagaggtatatcaacgatattctaactcttgacattttttatttatttaaaatgatacctttgttatttattttattctattttgctaacggtatcgaatggcataagtttgaaacgagtgaagaaataatttctacttacttattagacgacgtattatacacgggtgttaatggggcggtatacacattttcaaataataaactaaacaaaactggtttagctaatactaattatatcacaacatctataaaagtagaggatgcggataaggatacattagtatgcggaaccaataacggaaatcccaaatgttggaaaatagacggttcagacgacccaaaacatagaggtagaggatacgctccttatcaaaatagcaaagtaacgataatcagtcacaacggatgtgtactatctgacataaacatatcaaaagaaggaattaaacgatggagaagatttgacggaccatgtggttatgatttatacacggcggataacgtaattccaaaagatggtttacgaggagcattcgtcgataaagatggtacttatgacaaagtttacattcttttcactgatactatcggctcaaagagaattgtcaaaattccgtatatagcacaaatgtgcctaaacgacgaaggtggtccatcatcattgtctagtcatagatggtcgacgtttctcaaagtcgaattagaatgtgatatcgacggaagaagttatagacaaattattcattctagaactataaaaacagataatgatacgatactatatgtattcttcgatagtccgcattatgtacctattctatgaataccattaaacaatctttttctacgtcaaaattggaaggatatacaaagcaattgccgtctccagctcctggtatatgtctaccagctggaaaagttgttccacataccacgtttgaagtcatagaaaaatataatgtactagatgatattataaagcctttatctaaccaacctatcttcgaaggaccgtctggtgttaaatggttcgatataaaggagaaggaaaatgaacatcgggaatatagaatatacttcataaaagaaaattctatatattcgttcgatacaaaatctaaacaaactcgtagctcgcaagtcgatgcgcgactattttcagtaatggtaacttcgaaaccgttatttatagcagatatagggataggagtaggaatgccacaaatgaaaaaaatacttaaaatgtaatcttaatcgagtacaccacacgacaatgaacaaacataagacagattatgctggttatgcttgctgcgtaatatgcggtctaattgttggaattatttttacagcgacactattaaaagttgtagaacgtaaattagttcatacaccatcaatagataaaacgataaaagatgcatatattagagaagattgtcctactgactggataagctataataataaatgtatccatttatctactgatcgaaaaacctgggaggaaggacgtaatgcatgcaaagctctaaatccaaattcggatctaattaagatagagactccaaacgagttaagttttttaagaagcattagacgcggatattgggtaggagaatccgaaatattaaaccagacaaccccatataattttatagctaagaatgccacgaagaatggaactaaaaaacggaaatatatttgtagcacaacgaatactcccaaactgcattcgtgttacactatataacaattacactacatttttatcataccactacttcggttagatgttttagaaaaaaataaatatcgccgtaccgttcttgtttttataaaaataacaattaacaattatcaaattttttctttaatattttacgtggttgaccattcttggtggtaaaataatctcttagtgttggaatggaatgctgtttaatgtttccacactcatcgtatattttgacgtatgtagtcacatcgtttacgcaatagtcagactgtagttctatcatgcttcctacattagaaggaggaacagttttaaagtctcttggttttaatctattaccgttagttttcatgaaatcctttgttttatccacttcacattttaaataaatgtccactatacattcttctgttaattttactagatcgtcatgggtcatagaatttataggttccgtagtccatggatccaaactagcaaacttcgcgtatacggtatcgcgattagtgtatacaccaactgtatgaaaattaagaaaacagtttaatagatcaacagaaatatttaatcctccgtttgatacagatgcaccatatttatggattttggattcacacgttgtttgtctgaggggttcgtctagcgttgcttctacataaacttctattcccatatattctttattgtcagaatcgcataccgatttatcatcatacactgtttgaaaactaaatggtatacacatcaaaataacaaatactaacgagtacattctgcaatattgttatcgtaattggaaaaatagtgttcgagtgagttggattatgtgagtattggattgtatattttattttatattttgtaataagaataaaatgctaatgtcaagtttattccaatagatgtcttattaaaaacatatataataaataacaatggctgaatggcataaaattatcgaggatatctcaaaaaataataagttcgaggatgccgccatcgttgattacaagactacaaagaatgttctagctgctattcctaacagaacatttgccaagattaatccgggtgaaattattcctctcatcactaatcgtaatattctaaaacctcttattggtcagaaatattgtattgtatatactaactctctaatggatgagaacacgtatgctatggagttgcttactgggtacgcccctgtatctccgatcgttatagcgagaactcataccgcacttatatttttgatgggtaagccaacaacatccagacgtgacgtgtatagaacgtgtagagatcacgctacccgtgtacgcgcaactggtaattaaaataaaaagtaatattcatatgtagtgtcaattttaaatgatgatgatgaaatggataatatccatattgacgatgtcaataatgccggtattggcatacagctcatcgatttttagatttcattcagaggatgtggaattatgttatgggcatttgtattttgataggatctataatgtagtaaatataaaatataatccgcatattccatatagatataattttattaatcgcacgttaaccgtagatgaactagacgataatgtcttttttacacatggttattttttaaaacacaaatatggttcacttaatcctagtttgattgtctcattatcaggaaacttaaaatataatgatatacaatgctcagtaaatgtatcgtgtctcattaaaaatttggcaacgagtacatctactatattaacatctaaacataagacttattctctacatcggtccacgtgtattactataataggatacgattctattatatggtataaagatataaatgacaagtataatggcatctatgattttactgcaatatgtatgctaatagcgtctacattgatagtgaccatatacgtgtttaaaaaaataaaaatgaactcttaattatgctatgctattagaaatggataaaatcaaaattacggttgattcaaaaattggtaatgttgttaccatatcgtataacttggaaaagataactattgatgtcacacctaaaaagaaaaaagaaaaggatgtattattagcgcaatcagttgctgtcgaagaggcaaaagatgtcaaggtagaagaaaaaaatattatcgatattgaagatgacgatgatatggatgtagaaagcgcataatacgatctataaaaataagtatataaatactttttatttactgtactcttactgtgtagtggtgataccctactcgattatttttttaaaaaaatacttattctgattcttctagccatttccgtgttcgttcgaatgccacatcgacgttaaagataggggagtagttgaaatctagttctgcattgttggtacgcacctcaaatgtagtgttggatatcttcaacgtatagttgttgagtagtgatggttttctaaatagaattctcttcatatcattcttgcacgcgtacatttttagcatccatcttggaattctagatccttgttctattcccaatggtttcatcaatagaagattaaacatatcgtacgaacacgatggagagtaatcgtagcaaaagtaagcatttcctttaatctcagatcccggatactggatatattttgcagccaacacgtgcatccatgcaacatttcctacatatacccggctatgcaccgcgtcatcatcgactgtacgatacataatgttaccgtgttgcttacattgctcgtaaaagactttcgtcaatttgtctccttctccgtaaattccagtgggtcttaggcaacaagtatacaattttgctccattcatgattacggaattattggctttcataaccagttgctcggccatacgtttactttttgcgtatacatgtcctggtgatatatcataaagggtatgctcatggccgatgaatggatcaccgtgtttatttggtcctattgcttccatgctactagtatagatcaaatacttgattcctaggtccacacaagctgccaatatagtctgtgttccataatagtttactttcatgatttcattatcggtgtattttccaaatacatccactagagcagccgtatgaataatcagatttaccccatctagcgcttctctcaccttatcaaagtcgtttatatcacattgtatatagtttataaccttaactttcgaggttattggttgtggatcttctacaatatctatgactctgatttcttgaacatcatctgcactaattaacagttttactatatacctgcctagaaatccggcaccaccagtaaccgcgtacacggccattgctgccactcataatatcagactacttattctattttactaaataatggctgtttgtataatagaccacgataatatcagaggagttatttactttgaaccagtccatggaaaagataaagttttaggatcagttattggattaaaatccggaacgtatagtttgataattcatcgttacggagatattagtcaaggatgtgattccataggcagtccagaaatatttatcggtaacatctttgtaaacagatatggtgtagcatatgtttatttagatacagatgtaaatatatctacaattattggaaaggcgttatctatttcaaaaaatgatcagagattagcgtgtggagttattggtatttcttacataaatgaaaagataatacattttcttacaattaacgagaatggcgtttgatatatcagttaatgcgtctaaaacaataaatgcattagtttacttttctactcagcaaaataaattagtcatacgtaatgaagttaatgatacacactacactgtcgaatttgatagggacaaagtagttgacacgtttatttcatataatagacataatgacaccatagagataagaggggtgcttccagaggaaactaatattggttgcgcggttaatacgccggttagtatgacttacttgtataataagtatagttttaaactgattttagcagaatatataagacacagaaatactatatccggcaatatttattcggcattgatgacactagatgatttggctattaaacagtatggagacattgatctattatttaatgagaaacttaaagtagactccgattcgggactatttgactttgtcaactttgtaaaggatatgatatgttgtgattctagaatagtagtagctctatctagtctagtatctaaacattgggaattgacaaataaaaagtataggtgtatggcattagccgaacatatatctgatagtattccaatatctgagctatctagactacgatacaatctatgtaagtatctacgcggacacactgagagcatagaggataaatttgattattttgaagacgatgattcgtctacatgttctgccgtaaccgacagggaaacggatgtataattttttttatagcgtgaaggatatgataaaaaatataattgttgtatttatcccattccaatcaccttatatgattctgtaacacaatgaaggagtctcatagatgtatagaggtcagatactggtttgataaactgtttattccacatgagtatgtttgactttatggttagacccgcatactttaacaaatcactgaaaattggagttaggtattgacctctcagaatcagttgccgttctggaacattaaatgtattttttatgatatactccaacgcatttatgtgggcatacaacaagtcattactaatggagtattccaagagttttagttgtctagtatttaacaagagaagagatttcaacagactgtttatgaactcgaatgccgcctcattgtcgcttatattgatgatgtcgaattctcccaatatcatcaccgatgagtagctcatcttgttatcgggatccaagttttctaaagatgtcattaaaccctcgatcatgaatggatttatcatcatcgtttttatgttggacatgagcttagtccgtttgtccacatctatagacgacgatttctgaattattttatatatccctctctttaactccaggaacttgtcaggatggtctactttaatatgttctcgtctaagagatgaaaatctttggatggttgcacgcgacttttctctaaaggatgacgttgcccaagatcctctcttaaatgaatccatcttatccttggacaagatggacagtctattttccttagatggtttaatatttttgttacccatgatctataaaggtagacctaatcgtctcggatgacctatatatttattttcagttttattatacgcataaattgtaaaaaatatgttaggtttacaaaaatgtctcgtggggcattaatcgtttttgaaggattggacaaatctggaaaaacaacacaatgtatgaacatcatggaatctataccggcaaacacgataaaatatcttaactttcctcagagatccactgtcactggaaagatgatagatgactatctaactcgtaaaaaaacctataatgatcatatagttaatctattattttgtgcaaatagatgggagtttgcatcttttatacaagaacaactagaacagggaattactttaatagttgatagatacgcgttctctggagtagcgtatgccgccgctaaaggcgcgtcaatgactctcagtaagagttatgaatctggattgcctaaacccgacttagttatattcttggaatctggtagcaaagaaattaatagaaacgtcggcgaggaaatttatgaagatgttacattccaacaaaaggtattacaagaatataaaaaaatgattgaagaaggagatattcattggcaaattatttcttctgaattcgaggaagatgtaaagaaggagttgattaagaatatagttatagaggctatacacacggttactggaccagtggggcaactgtggatgtaatagtgaaattacattttttataaatagatgttagtacagtgttataaatggatgaagcatattactctggcaacttggaatcagtactcggatacgtgtccgatatgcataccgaactcgcatcaatatctcaattagttattgccaagatagaaactatagataatgatatattaaacaaggacattgtaaattttatcatgtgtagatcaaacttggataatccatttatctctttcctagatactgtatatactattatagatcaagagaactatcagaccgaattgattaattcattagacgacaatgaaattatcgattgtatagttaataagtttatgagcttttataaggataacctagaaaatatagtagatgctatcattactctaaaatatataatgaataatccagattttaaaactacgtatgccgaagtactcggttccagaatagccgatatagatattaaacaagtgatacgtgagaatatactacaattgtctaatgatatccgcgaacgatatttgtgaaaaatattaaaaaaaaatactttttttattaaatgacgtcgcttcgcgaatttagaaaattatgctgtgatatatatcacgcatcaggatataaagaaaaatctaaattaattagagactttataacagatagggatgataaatatttgatcattaagctattgcttcccggattagacgatagaatttataacatgaacgataaacaaattataaaattatatagtataatatttaaacaatctcaggaagatatgctacaagatttaggatacggatatataggagacactattaggactttcttcaaagagaacacagaaatccgtccacgagataaaagcattttaactttagaagacgtggatagtttcttaactacgttatcatccgtaactaaagaatcgcatcaaataaaattattgactgatatcgcatccgtttgtacatgtaatgatttaaaatgtgtagtcatgcttattgataaagatctaaaaattaaagcgggtcctcggtacgtacttaacgctattagtcctaatgcctatgatgtgtttagaaaatctaataacttgaaagagataatagaaaatgcatctaaacaaaatctagactctatatctatttctgttatgactccaattaatcccatgttagcggaatcgtgtgattctgtcaataaggcgtttaaaaaatttccatcaggaatgtttgcggaagtcaaatacgatggtgaaagagtacaagttcataaaaataataacgagtttgccttctttagtagaaacatgaaaccagtactctctcataaagtggattatctcaaagaatacataccgaaagcatttaaaaaagctacgtctatcgtattggattctgaaattgttcttgtagacgaacataatgtaccgctcccgtttggaagtttaggaatacacaaaaagaaagaatataaaaactctaacatgtgtttgttcgtgtttgactgtttgtactttgatggattcgatatgacggacattccattgtacgaacgaagatcttttctcaaagatgttatggttgaaatacccaatagaatagtattctcagagttgacgaatattagtaacgagtctcagttaactgacgtattggatgatgcactaacgagaaaattagaaggattggtcttaaaagatattaatggagtatacgaaccgggaaagagaagatggttaaaaataaagcgagactatttgaacgagggttccatggcagattctgccgatttagtagtactaggtgcttactatggtaaaggagcaaagggtggtatcatggcagtctttctaatgggttgttacgacgatgaatccggtaaatggaagacggttaccaagtgttcaggacacgatgataatacgttaagggttttgcaagaccaattaacgatggttaaaattaacaaggatcccaaaaaaattccagagtggttggtagttaataaaatctatattcccgattttgtagtagaggatccgaaacaatctcagatatgggaaatttcaggagcagagtttacatcttccaagtcccataccgcaaatggaatatccattagatttcctagatttactaggattagagaagataaaacgtggaaagaatctactcatctaaacgatttagtaaacttgactaaatcttaatagttacatacaaactgaaaattaaaataacactatttagttggtggtcgccatggatggtgttattgtatactgtctaaacgcgttagtaaaacatggcgaggaaataaatcatataaaaaatgatttcatgattaaaccatgttgtgaaagagtttgtgaaaaagtcaagaacgttcacattggcggacaatctaaaaacaatacagtgattgcagatttgccatatatggataatgcggtatccgatgtatgcaattcactgtataaaaagaatgtatcaagaatatccagatttgctaatttgataaagatagatgacgatgacaagactcctactggtgtatataattattttaaacctaaagatgttattcctgttatcatatctataggaaaggataaagatgtctgtgaactattaatctcatcagacatatcgtgtgcatgcgtggagttaaattcatatcacgtagccattcttcccatggatgtttccttttttaccaaaggaaatgcatcattgattattctcctgtttgatttctctatcgatgcagcacctctcttaagaagtgtaaccgataataatgttattatatctagacaccagcgtctacatgacgagcttccgagttccaattggttcaagttttacataagtataaagtccgactattgttctatattatatatggttgttgatggatctgtgatgcatgcgatagctgataatagaactcacgcaattattagcaaaaatatattagacaatactacgattaacgatgagtgtagatgctgttattttgaaccacagattaggattcttgatagagatgagatgctcaatggatcatcgtgtgatatgaacagacattgtattatgatgaatttacctgatgtaggcaaatttggatctagtatgttggggaaatatgaacctgacatgattaagattgctctttcggtggctggtaatttaataagaaatcgagactacattcccgggagacgaggatatagctactacgtttacggtatagcctctagataatttttttaagcacgaaataaaaaacataattttaaaccaatctatttcatactattttgtgtgatcaccatggacataaagatagatattagtatttctggtgataaatttacggtgactactaggagggaaaatgaagaaagaaaaaaatatctacctctccaaaaagaaaaaactactgatgttatcaaacctgattatcttgagtacgatgacttgttagatagagatgagatgtttactattctagaggaatattttatgtacagaggtctattaggcctcagaataaaatatggacgactctttaacgaaattaaaaaattcgacaatgatgcggaagaacaattcggtactatagaagaactcaagcagaaacttagattaaattctgaagagggagcagataactttatagattatataaaggtacaaaaacaggatatcgtcaaacttactgtatacgattgcatatctatgataggattgtgtgcatgcgtggtagatgtttggagaaatgagaaactgttttctagatggaaatattgtttacgagctattaaactgtttattaatgatcacatgcttgataagataaaatctatactgcagaatagactagtatatgtggaaatgtcatagaaagttaaaagttaatgagagcaaaaatatataaggttgtattccatatttgttattttttctgtaatagttagaaaaatacattcgatggtctatctaccagattattatgtgttataaggtactttttctcataataaactagagtatgagtaagatagtgtttttcaaaacatataaatctaaaattgatggatgagatatacagctattaatttcgaaaatatattttaatctgataactttaaacatggatttttgatggtggtttaacgttttaaaaaaagattttgttattgtagtatatgataatattaaaagatggatataaagaatttgctgactgcatgtactattttttacattactacattggctacggcagatatacctactccgccaccaacgggtcatgtgacaagggagaatatcttgataagaggcataatcaatgttgtaatcggtgtccacctggagaatttgccaaggttagatgtaatggtaacgataacacaaaatgtgaacgctgcccacctcatacatataccacaatcccaattattctaatggatgtcatcaatgtagaaaatgcccaaccggatcatttgataaggtaaagtgtaccggaacacagaacagtaaatgttcgtgtcttcctggttggtattgtgctactgattcttcacagactgaagattgttgaaattgtgtaccaaaaaggagatgtccatgcggatactttggtggaatagatgaacaaggaaatcctatttgtaaatcgtgttgtgttggtgaatattgcgactacctacgtaattatagacttgatccatttcctccatgcaaactatctaaatgtaattaattatgattttgatgataatgttaccatacattatatcgctacttggttagtgtattattcagtatgaagacctattaataattacttatcttttgacgatcttgttataattataatataaaaatacttatggcatagtaactcataattgctgacgcgataaattcgtaataatctgttttgttcaaatttttataaggaatctacaggcataaaaataaaaatataatttataatatactcttacagcgcgccatcatgaataacagcagtgaattgattgctgttattaatggatttagaaatagtggacgattttgtgatattagtatagttattaatgatgaaaggataaacgctcataaactcatcctatctggagcctccgaatatttttccattctgttttccaataattttatcgattctaatgaatacgaagttaatctaagtcatttagattatcaaagcgttaacgatttgatcgattacatttatgggatacctttgagcctaactaacgataacgtgaaatatattctttcaaccgctgattttttacaaattggatctgctattacggagtgtgaaaattacatacttaaaaatctttgttctaaaaactgtatcgatttctacatatacgctgataaatataataacaagaaaatagaatcagcgtcgtttaacacaatattacaaaatattttgagactcatcaacgatgaaaactttaaatacttaacagaggaatcaatgataaaaattttaagcgatgatatgttaaatataaaaaatgaggattttgcaccactaattctcattaaatggttagagagtactcaacaatcatgcaccgtcgagttacttagatgcctcagaatatcattgctttccccacaagttataaaatcactttatagtcatcaactggttagttcaatctacgaatgtataacattcttaaacaatatagcattcttggatgaatcatttcctagataccatagcatcgagttgatatctatcggtataagtaattcgcatgataagatttccataaactgctacaatcataaaaaaaatacatgggaaatgatatcttcacgtagatataggtgtagtttcgcagtggccgtcctggataatattatctatatgatgggtggatatgatcagtccccgtatagaagttcaaaggttatagcgtacaatacatgtacaaattcttggatatatgatataccagagctaaaatatcctcgttctaattgtgggggactggctgatgacgaatacatttattgtataggcggcatacgcgatcaggattcatcgttgacatctagtattgataaatggaagccatcaaaaccatattggcagaagtatgctaaaatgcgcgaaccaaaatgtgatatgggggttgcgatgttaaacggattaatatatgtcatgggtggaatcgttaaaggtgacacgtgtaccgacgcactagagagtttatcagaagatggatggatgaagcatcaacgtcttccaataaaaatgtccaatatgtcgacgattgttcatgatggcaagatttatatatctggaggttacaacaatagtagtgtagttaatgtaatatcgaatctagtccttagctataatccgatatatgatgaatggaccaaattatcatcattaaacattcctagaattaatcccgctctatggtcagcgcataataaattatatgtaggaggaggaatatctgatgatgttcgaactaatacatctgaaacatacgataaagaaaaagattgttggacattggataatggtcacgtgttaccacgcaattatataatgtataaatgcgaaccgattaaacataaatatccattggaaaaaacacagtacacgaatgattttctaaagtatttggaaagttttataggtagttgatagaacaaaatacataattttgtaaaaataaatcactttttatactaatatgacacgattaccaatacttttgttactaatatcattagtatacgctacaccttttcctcagacatctaaaaaaataggtgatgatgcaactctatcatgtaatcgaaataatacaaatgactacgttgttatgagtgcttggtataaggagcccaattccattattcttttagctgctaaaagcgacgtcttgtattttgataattataccaaggataaaatatcttacgactctccatacgatgatctagttacaactatcacaattaaatcattgactgctagagatgccggtacttatgtatgtgcattctttatgacatcaactacaaatgacactgataaagtagattatgaagaatactccacagagttgattgtaaatacagatagtgaatcgactatagacataatactatctggatctacacattcaccggaaactagttctaagaaacctgattatatagataattctaattgctcgtcggtattcgaaatcgcgactccggaaccaattactgataatgtagaagatcatacagacaccgtcacatacactagtgatagcattaatacagtaagtgcatcatctggagaatccacaacagacgagactccggaaccaattactgataaagaagatcatacagttacagacactgtctcatacactacagtaagtacatcatctggaattgtcactactaaatcaaccaccgatgatgcggatctttatgatacgtacaatgataatgatacagtaccaccaactactgtaggcggtagtacaacctctattagcaattataaaaccaaggactttgtagaaatatttggtattaccgcattaattatattgtcggccgtggcaattttctgtattacatattatatatataataaacgttcacgtaaatacaaaacagagaacaaagtctagatttttgacttacataaatgtctgggatagtaaaatctatcatattgagcggaccatctggtttaggaaagacagccatagccaaaagactatgggaatatatttggatttgtggtgtcccataccactagatttcctcgtcctatggaacgagaaggtgttgattaccattacgttaacagagaggccatctggaagggaatagccgccggaaactttctagaacatactgagtttttaggaaatatttacggaacttctaaaacagctgtgaatacagcggctattaataatcgtatttgtgtgatggatctaaacatcgacggtgttagaagtcttaaaaatacgtacctaatgccttactcggtgtatataagacctacctctcttaaaatggttgagaccaagcttcgttgtagaaacactgaagctaacgatgagattcatcgtcgcgtgatattggcaaaaacggatatggatgaggccaacgaagcaggtctattcgacactattatcattgaagatgatgtgaatttagcatatagtaagttaattcagatactacaggaccgtattagaatgtattttaacactaattagagacttaagacttaaaacttgataattaataatataactcgtttttatatgtggctatttcaacgtctaatgtattagttaaatattaaaacttaccacgtaaaacttaaaatttaaaatgatatttcattgacagatagatcacacattatgaactttcaaggacttgtgttaactgacaattgcaaaaatcaatgggtcgttggaccattaataggaaaaggtggattcggtagtatttatactactaatgacaataattatgtagtaaaaatagagcccaaagctaacggatcattatttaccgaacaggcattttatactagagtacttaaaccatccgttatcgaagaatggaaaaaatctcacaatataaagcacgtaggtcttatcacgtgcaaggcatttggtctatacaaatccattaatgtggaatatcgattcttggtaattaatagattaggtgcagatctagatgcggtgatcagagccaataataatagattaccaaaaaggtcggtgatgttgatcggaatcgaaatcttaaataccatacaatttatgcacgagcaaggatattctcacggagatattaaagcgagtaatatagtcttggatcaaatagataagaataaattatatctagtggattacggattggtttctaaattcatgtctaatggagaacatgttccatttataagaaatccaaataaaatggataacggtactctagaatttacacctatagattcgcataaaggatacgttgtatctagacgtggagatctagaaacacttggatattgtatgattagatggttgggaggtatcttgccatggactaagatatctgaaacaaagaattgtgcattagtaagtgccacaaaacagaaatatgttaacaatactgcgactttgttaatgaccagtttgcaatatgcacctagagaattgctgcaatatattaccatggtaaactctttgacatattttgaggaacccaattatgacgagtttcggcacatattaatgcagggtgtatattattaagtgtggtgtttggtcgatgtaaaatttttgtcgataaaaattaaaaaataacttaatttattattgatctcgtgtgtacaaccgaaatcatggcgatgttttacgcacacgctctcggtgggtacgacgagaatcttcatgcctttcctggaatatcatcgactgttgccaatgatgtcaggaaatattctgttgtgtcagtttataataacaagtatgacattgtaaaagacaaatatatgtggtgttacagtcaggtgaacaagagatatattggagcactgctgcctatgtttgagtgcaatgaatatctacaaattggagatccgatccatgatcaagaaggaaatcaaatctctatcatcacatatcgccacaaaaactactatgctctaagcggaatcgggtacgagagtctagacttgtgtttggaaggagtagggattcatcatcacgtacttgaaacaggaaacgctgtatatggaaaagttcaacatgattattctactatcaaagagaaggccaaagaaatgaatgcacttagtccaggacctatcattgattaccacgtctggataggagattgtatctgtcaagttactgctgtggacgtacatggaaaggaaattatgagaatgagattcaaaaagggtgcggtgcttccgatcccaaatctggtaaaagttaaacttggggagaatgatacagaaaatctttcttctactatatcggcggcaccatcgaggtaaccacctctctggaagacagcgtgaataatgtactcatgaaacgtttggaaactatacgccatatgtggtctgtcgtatatgatcattttgatattgtgaatggtaaagaatgctgttatgtgcatacgcatttgtctaatcaaaatcttataccgagtactgtaaaaacaaatttgtacatgaagactatgggatcatgcattcaaatggattccatggaagctctagagtatcttagcgaactgaaggaatcaggtggatggagtcccagaccagaaatgcaggaatttgaatatccagatggagtggaagacactgaatcaattgagagattggtagaggagttcttcaatagatcagaacttcaggctggtgaatcagtcaaatttggtaattctattaatgttaaacatacatctgtttcagctaagcaactaagaacacgtatacggcagcagcttcctttatactctcatcttttaccaacacaaagggtggatatttgttcattggagttgataataatacacacaaagtaattggattcacggtgggtcatgactacctcagactggtagagaatgatatagaaaagcatatcaaaagacttcgtgttgtgcatttctgtgagaagaaagaggacatcaagtacacgtgtcgattcatcaaggtatataaacctggggatgaggctacctcgacatacgtgtgcgctatcaaagtggaaagatgctgttgtgctgtgtttgcagattggccagaatcatggtatatggatactaatggtatcaagaagtattctccagatgaatgggtgtcacatataaaattttaattaatgtaatagagaacaaataataaggttgtaatatcatatagacaataactaacaattaattagtaactgttatctcttttttaactaaccaactaactatatacctattaatacatcgtaattatagttcttaacatctattaatcattaattcgcttctttaattttttataaactaacattgttaattgaaaagggataacatgttacagaatataaattatatatggatttttttaaaaaggaaatacttgactggagtatatatttatctcttcattatatagcacgcgtgttttccaatttttccacatcccatataatacaggattataatctcgttcgaacatacgagaaagtggataaaacaatagttgattttttatctaggttgccaaatttattccatattttagaatatggggaaaatattctacatatttattctatggatgatgctaatacgaatattataattttttttctagatagagtattaaatattaataagaacgggtcatttatacacaatctcaggttatcatcatccattaatataaaagaatatgtatatcaattagttaataatgatcatccagataataggataagactaatgcttgaaaatggacgtagaacaagacattttttgtcctatatatcagatacagttaatatctatatatgtattttaataaatcatggattttatatagatgccgaagacagttacggttgtacattattacatagatgtatatatcactataagaaatcagaatcagaatcatacaatgaattaattaagatattgttaaataatggatcagatgtagataaaaaagatacgtacggaaacacaccttttatcctattatgtaaacacgatatcaacaacgtggaattgtttgagatatgtttagagaatgctaatatagactctgtagactttaatagatatacacctcttcattatgtctcatgtcgtaataaatatgattttgtaaagttattaatttctaaaggagcaaatgttaatgcgcgtaatagattcggaactactccattttattgtggaattatacacggtatctcgcttataaaactatatttggaatcagacacagagttagaaatagataatgaacatatagttcgtcatttaataatttttgatgctgttgaatctttagattatctattatccagaggagttattgatattaactatcgtactatatacaacgaaacatctatttacgacgctgtcagttataatgcgtataatacgttggtctatctattaaacagaaatggtgattttgagacgattactactagtggatgtacatgtatttcggaagcagtcgcaaacaacaacaaaataataatggaagtactattgtctaaacgaccatctttgaaaattatgatacagtctatgatagcaattactaaacataaacagcataatgcagatttattgaaaatgtgtataaaatatactgcgtgtatgaccgattatgatactcttatagatgtacagtcgctacagcaatataaatggtatattttaaaatgtttcgatgaaatagatatcatgaagagatgttatataaaaaataaaactgtattccaattagttttttgtatcaaagacattaatactttaatgagatacggtaaacatccttctttcgtgaaatgcactagtctcgacgtatacggaagtcgtgtacgtaatatcatagcatctattagatatcgtcagagattaattagtctattatccaagaagctggatcctggagataaatggtcgtgttttcctaacgaaataaaatataaaatattggaaaactttaacgataacgaactatccacatatctaaaaatcttataaacactattaaaatataaaatctaagtaggataaaatcacactacatcattgtttccttttagtgctcgacagtgtatactatttttaacactcataaataaaaatgaaaacgatttccgttgttacgttgttatgcgtactacctgctgttgtttattcaacatgtactgtacccactatgaataacgctaaattaacgtctaccgaaacatcgtttaatgataaacagaaagttacgtttacatgtgatcagggatatcattcttcggatccaaatgctgtctgcgaaacagataaatggaaatacgaaaatccatgcaaaaaaatgtgcacagtttctgattacatctctgaattatataataaaccgctatacgaagtgaattccaccatgacactaagttgcaacggcgaaacaaaatattttcgttgcgaagaaaaaaatggaaatacttcttggaatgatactgttacgtgtcctaatgcggaatgtcaacctcttcaattagaacacggatcgtgtcaaccagttaaagaaaaatactcatttggggaatatatgactatcaactgtgatgttggatatgaggttattggtgcttcgtacataagttgtacagctaattcttggaatgttattccatcatgtcaacaaaaatgtgatatgccgtctctatctaatggattaatttccggatctacattttctatcggtggcgttatacatcttagttgtaaaagtggttttacactaacggggtctccatcatccacatgtatcgacggtaaatggaatcccgtactcccaatatgtgtacgaactaacgaagaatttgatccagtggatgatggtcccgacgatgagacagatttgagcaaactctcgaaagacgttgtacaatatgaacaagaaatagaatcgttagaagcaacttatcatataatcatagtggcgttaacaattatgggcgtcatatttttaatctccgttatagtattagtttgttcctgtgacaaaaataatgaccaatataagttccataaattgctaccgtaaatataaatccgttaaaataatgaataattaataacgaacaagtatcaaaagattaaagaattatagctagaatcaattgagatgtcttcttcagtggatgttgatatctacgatgccgttagagcatttttactcaggcactattataacaagagatttattgtgtatggaagaagtaacgccatattacataatatatacaggctatttacaagatgcgccgttataccgttcgatgatatagtacgtactatgccaaatgaatcacgtgttaaacaatgggtgatggatacacttaatggtataatgatgaatgaacgcgatgtttctgtaagcgttggcaccggaatactattcatggaaatgtttttcgattacaataaaaatagtatcaacaatcaactaatgtatgatataattaatagcgtatctataattctagctaatgagagatatagaagcgcttttaacgacgatggtatatacatccgtagaaatatgattaacaagttgtacggatacgcatctctaactactattggcacgatcgctggaggtgtttgttattatctgttgatgcatctagttagtttgtataaataattatttcaatatactagttaaaattttaagattttaaatgtataaaaaactaataacgtttttatttgtaataggtgcattagcatcctattcgaataatgagtacactccgtttaataaactgagtgtaaaactctatatagatggagtagataatatagaaaattcatatactgatgataataatgaattggtgttaaattttaaagagtacacaatttctattattacagagtcatgcgacgtcggatttgattccatagatatagatgttataaacgactataaaattattgatatgtataccattgactcgtctactattcaacgcagaggtcacacgtgtagaatatctaccaaattatcatgccattatgataagtacccttatattcacaaatatgatggtgatgagcgacaatattctattactgcagagggaaaatgctataaaggaataaaatatgaaataagtatgatcaacgatgatactctattgagaaaacatactcttaaaattggatctacttatatatttgatcgtcatggacatagtaatacatattattcaaaatatgatttttaaaaatttaaaatatattatcacttcagtgacagtagtcaaataacaaacaacaccatgagatatattataattctcgcagttttgttcattaatagtatacacgctaaaataactagttataagtttgaatccgtcaattttgattccaaaattgaatggactggggatggtctatacaatatatcccttaaaaattatggcatcaagacgtggcaaacaatgtatacaaatgtaccagaaggaacatacgacatatccgcatttccaaagaatgatttcgtatctttctgggttaaatttgaacaaggcgattataaagtggaagagtattgtacgggactatgcgtcgaagtaaaaattggaccaccgactgtaacattgactgaatacgacgaccatatcaatttgtacatcgagcatccgtatgctactagaggtagcaaaaagattcctatttacaaacgcggtgacatgtgtgatatctacttgttgtatacggctaacttcacattcggagattctaaagaaccagtaccatatgatatcgatgactacgattgcacgtctacaggttgcagcatagactttgtcacaacagaaaaagtgtgcgtgacagcacagggagccacagaagggtttctcgaaaaaattactccatggagttcgaaagtatgtctgacacctaaaaagagtgtatatacatgcgcaattagatccaaagaagatgttcccaatttcaaggacaaaatggccagagttatcaagagaaaatttaataaacagtctcaatcttatttaactaaatttctcggtagcacatcaaatgatgttaccacttttcttagcatgcttaacttgactaaatattcataactaatttttattaatgatacaaaaacgaaataaaactgcatattatacactggttaacgcccttataggctctaaccattttcaagatgaggtccctgattatagtccttctgttcccctctatcatctactccatgtctattagacaatgtgagaagactgaagaggaaacatggggattgaaaatagggttgtgtataattgccaaagatttctatcccgaaagaactgattgcagtgttcatctcccaactgcaagtgaaggattgataactgaaggcaatggattcagggatatacgaaacaccgataaattataaaaaaagcaatgtgtccgctgtttccgttaataatactattttcgtaactggcggattattcataaataactctaatagcacgatcgtggttaacaatatggaaaaacttgacatttataaagacaaacaatggtcgattatagaaatgcctatggctagggtatatcacggcatcgactcgacatttggaatgttatattttgccggaggtctatccgttaccgaacaatatggtaatttagagaaaaacaacgagatatcttgttacaatcctagaacgaataagtggtttgatatttcatatactatttataagatatccatatcatcattgtgtaaactaaataacgtcttctatgtatttagtaaggacattggatatgtggaaaagtatgatggtgcatggaagttagtacatgatcgtctccccgctataaaggcattatcaacttctccttattgattgaaaatgaaaatataaatagtttttatgtatagcagtattaccctatagttttattgcttactactaacatggatacagatgttacaaatgtagaagatatcataaatgaaatagatagagagaaagaagaaatactaaaaaatgtagaaattgaaaataataaaaacattaacaagaatcatccaagtggatatattagagaagcactcgttattaataccagtagtaatagtgattccattgataaagaagttatagaatgtatctgtcacgatgtaggaatatagatcatatctactaatttttataatcgatacaaaacataaaaaacaactcgttattacatagcaggcatggaatccttcaagtattgttttgataacgatggcaagaaatggattatcggaaatactttatattctggtaattcaatactatataaggtcagaaaaaatttcactagttcgttctacaattacgtaatgaagatagatcacaaatcacacaagccattgttgtctgaaatacgattctatatatctgtattggatcctttgactatcgacaactggacacgggaacgtggtataaagtatttggctattccagatctgtatggaattggagaaaccgatgattatatgttcttcgttataaagaatttgggaagagtattcgccccaaaggatactgaatcagtcttcgaagcatgcgtcactatgataaacacgttagagtttatacactctcaaggatttacccatggaaaaatagaaccgaggaatatactgattagaaataaacgtctttcactaattgactattctagaactaacaaactatacaagagtggaaactcacatatagattacaacgaggacatgataacttcaggaaatatcaattatatgtgtgtagacaatcatcttggagcaacagtttcaagacgaggagatttagaaatgttgggatattgcatgatagaatggttcggtggcaaacttccatggaaaaacgaaagtagtataaaagtaataaaacaaaaaaaagaatataaaaaatttatagctactttctttgaggactgttttcctgaaggaaatgaacctctggaattagttagatatatagaattagtatacacgttagattattctcaaactcctaattatgacagactacgtaaactgtttatacaagattgaaattatattcttttttttatagagtgtggtagtgttacggatatttaatattagactatctctatcgcgctacacgaccaatatcgattactatggatatcttcagggaaatcgcatcttctatgaaaggagagaatgtattcatttctccagcgtcaatctcgtcagtattgacaatactgtattatggagctaatggatccactgctgaacagctatcaaaatatgtagaaaaggaggagaacatggataaggttagcgctcaaaatatctcattcaaatccataaataaagtatatgggcgatattctgccgtgtttaaagattcctttttgagaaaaattggcgataagtttcaaactgttgacttcactgattgtcgcactatagatgcaatcaacaagtgtgtagatatctttactgaggggaaaatcaatccactattggatgaaccattgtctcctgatacctgtctcctagcaattagtgccgtatactttaaagcaaaatggttgacgccattcgaaaaggaatttaccagtgattatcccttttacgtatctccgacggaaatggtagatgtaagtatgatgtctatgtacggcaaggcatttaatcacgcatctgtaaaggaatcattcggcaacttttcaatcatagaactgccatatgttggagatactagtatgatggtcattcttccagacaagattgatggattagaatccatagaacaaaatctaacagatacaaattttaagaaatggtgtaactctctggaagctacgtttatcgatgttcacattcccaagtttaaggtaacaggctcgtataatctggtggatactctagtaaagtcaggactgacagaggtgttcggttcaactggagattatagcaatatgtgtaattcagatgtgagtgtcgacgctatgatccacaaaacgtatatagatgtcaatgaagagtatacagaagcagctgcagcaacttgtgcactggtgtcagactgtgcatcaacaattacaaatgagttctgtgtagatcatccgttcatctatgtgattaggcatgttgatggaaaaattcttttcgttggtagatattgctctccgacaactaattgttaaccattttttttaaaaaatagaaaaaacatgtggtattagtgcaggtcgttattcttccaattgcaattggtaagatgacggccaactttagtacccacgtcttttcaccacagcactgtggatgtgacagactgaccagtattgatgacgtcagacaatgtttgactgaatatatttattggtcgtcctatgcataccgcaacaggcaatgcgctggacaattgtattccacactcctctcttttagagatgatgcggaattagtgttcatcgacattcgcgagctggtaaaaaatatgccgtgggatgatgtcaaagattgtgcagaaatcatccgttgttatataccggatgagcaaaaaaccatcagagagatttcggccatcatcggactttgtgcatatgctgctacttactggggaggtgaagaccatcccactagtaacagtctgaacgcattgtttgtgatgcttgagatgctcaattacgtggattataacatcatattccggcgtatgaattgatgagttgtacatcttgacattttcttctttcttctcttctccctttcccagaaacaaactttttttacccactataaaataaaatgagtatactacctgttatatttctttctatatttttttattcttcattcgttcagacttttaacgcgcctgaatgtatcgacaaagggcaatattttgcatcattcatggagttagaaaacgagccagtaatcttaccatgtcctcaaataaatacgctatcatccggatataatatattagatattttatgggaaaaacgaggagcggataatgatagaattataccgatagataatggtagcaatatgctaattctgaacccgacacaatcagactctggtatttatatatgcattaccacgaacgaaacctactgtgacatgatgtcgttaaatttgacaatcgtgtctgtctcagaatcaaatatagatcttatctcgtatccacaaatagtaaatgagagatctactggcgaaatggtatgtcccaatattaatgcatttattgctagtaacgtaaacgcagatattatatggagcgggcatcgacgccttagaaataagagacttaaacaacggacacctggaattattaccatagaagatgttagaaaaaatgatgctggttattatacatgtgttttagaatatatatacggtggcaaaacatataacgtaaccagaattgtaaaattagaggtacgggataaaataataccttctactatgcaattaccagatggcattgtaacttcaataggtagtaatttgactattgcatgcagagtatcgttgagacctcccacaacggatgcagacgtcttttggataagtaatggtatgtattacgaagaagatgatggggacggaaacggtagaataagtgtagcaaataaaatctatatgaccgataagagacgtgttattacatcccggttaaacattaatcctgtcaaggaagaagatgctacaacgtttacgtgtatggcgtttactattcctagcatcagtaaaacagttactgttagtataacgtgaatgtatgttgttacatttccatgtcaattgagtttataagaatttttatacattatcttccaacaagcaattgacgaacgtattgctatgattaactcccacgatactatgcatattattaatcattaacttgcagactatacctagagctattttgacatactcgtgttcttgtgtaattgcagtatctatattattaaagtacgtaaatctagctatagttttattatttaattttagataatataccgtctccttatttttaaaaattgccacatcctttattaaatcatgaatgggaatttctatgtcatagttaatatattgtgaacaacaagagcagatatctataggaaagggtggaatgcgatacattgatctatgtagttttaaaacacacgcaaactttgaagaatttatataaatcattccatcgatacatccttctatgttgagatgtatatatccaggaattcgtttattaatatcgggaaatgtataaactaaaacattgcccggaagcggagcttctaccggagttatatcagtttttaacttacaaaatgtaaccaatacctttgcatgacttgttttgttcggcaacgttagtttaaacttgacgaatggattaattacaatagcatgatccgcgcatctattaagtttttttactttaacgcccttgtatgtttttacagagactttatctaaatttctagtgcttgtatgtgttataaatataacgggatatagaactgaatcacctaccttagatacccaattacattttatcagatccagataataaacaaattttgtcgccctaactaattctatattgttatatattttacaattggttatgatatcatgtaataacttggaatctaacgcacatcgtcgtacgtttatacaattgtgatttagtgtagtatatctacacatgtatttttccgcgctatagtattctggactagtgataaaactatcgttatatctgtcttcaatgaactcatcgagatattgctctctgtcatattcatacacctgcataaactttctagacatcttacaatccgtgttattttaggatcatatttacatatttacgggtatatcaaagatgttagattagttaatgggaatcgtctataataatgaatattaaacaattatatgaggacttttaccacaaagcatcataaaaatgagtcgtcgtctgatttatgttttaaatatcaaccgcgaatcaactcataaaatacaagagaatgaaatatatacatattttagtcattgcaatatagaccatacttctacagaacttgattttgtagttaaaaactatgatctaaacagacgacaacctgtaactgggtatactgcactacactgctatttgtataataattactttacaaacgatgtactgaagatattattaaatcatggagtggatgtaacgatgaaaaccagtagcggacgtatgcctgtttatatattgcttactagatgttgcaatatttcacatgatgtagtgatagatatgatagacaaagataaaaaccacttattacatagagactattccaacctattactagagtatataaaatctcgttacatgttattaaaggaagaggatatcgatgagaacatagtatccactttattagataagggaatcgatcctaactttaaacaagacggatatacagcgttacattattattatttgtgtctcgcacacgtttataaaccaggtgagtgtagaaaaccgataacgataaaaaaggccaagcgaattatttctttgtttatacaacatggagctaatctaaacgcgttagataattgtggtaatacaccattccatttgtatcttagtattgaaatgtgtaataatattcatatgactaaaatgctgttgacttttaatccgaatttcgaaatatgtaataatcatggattaacgcctatactatgttatataacttccgactacatacaacacgatattcttgttatgttaatacatcactatgaaacaaatgttggagaaatgccgatagatgagcgtcgtataatcgtattcgagtttatcaaaacatattctacacgtcctgcagattcgataacttatttgatgaataggtttaaaaatatagatatttatacccgctatgaaggaaagacattattacacgtagcatgtgaatataataatacacacgtaatagattatcttatacgtatcaacggagatataaatgcgttaaccgacaataacaaacacgctacacaactcattatagataacaaagaaaattccccatataccattaattgtttactgtatatacttagatatattgtagataagaatgtgataagatcgttggtggatcaacttccatctctacctatcttcgatataaaatcatttgagaaattcatatcctactgtatacttttagatgacacattttacaatagacacgttaggaatcgcgattctaaaacgtatcgatacgcattttcaaaatacatgtcgtttgataaatacgatggtataataactaaatgtcataaagaaacaatattgctcaaactatccactgttctagacactacactatatgcagttttaagatgccataattcgaaaaagttaagaagatacctcaccgagttaaaaaaatataataacgataagtcctttaaaatatattctaatattatgaatgagagataccttaatgtatattataaagatatgtacgtgtcaaaggtatatgataaactatttcctgttttcacagataaaaattgtctactaacattactaccttcagaaattatatacgaaatattatacatgctgacaattaacgatctttataatatatcgtatccacctaccaaagtatagttgtatttttctcatgcgatgtgtgtaaaaaaactgatattatataaatattttagtgccgtataataaagatgacgatgaaaatgatggtacatatatatttcgtatcattattgttattgctattccacagttacgccatagacatcgaaaatgaaatcacagaattcttcaataaaatgagagatactctaccagctaaagactctaaatggttgaatccagcatgtatgttcggaggcacaatgaatgatatagccgctctaggagagccattcagcgcaaagtgtcctcctattgaagacagtcttttatcgcacagatataaagactatgtggttaaatgggaaaggctagaaaaaaatagacggcgacaggtttctaataaacgtgttaaacatggtgatttatggatagccaactatacatctaaattcagtaaccgtaggtatttgtgcaccgtaactacaaagaatggtgactgtgttcagggtatagttagatctcatattagaaaacctccttcatgcattccaaaaacatatgaactaggtactcatgataagtatggcatagacttatactgtggaattctttacgcaaaacattataataatataacttggtataaagataataaggaaattaatatcgacgacattaagtattcacaaacgggaaaggaattaattattcataatccagagttagaagatagcggaagatacgactgttacgttcattacgacgacgttagaatcaagaatgatatcgtagtatcaagatgtaaaatacttacggttataccgtcacaagaccacaggtttaaactaatactagatccaaaaatcaacgtaacgataggagaacctgccaatataacatgcactgctgtgtcaacgtcattattgattgacgatgtactgattgaatgggaaaatccatccggatggcttataggattcgattttgatgtatactctgttttaactagtagaggcggtattaccgaggcgaccttgtactttgaaaatgttactgaagaatatataggtaatacatataaatgtcgtggacacaactattattttgaaaaaacccttacaactacagtagtattggagtaaatatacaatgcatttttatatacattactgaataattattattattatttatatcgtatttgtgctataacgcgactatctaggtatttgtatctcaccgatagagaacatataaatgtagactctattaaacagttgtgtaaaatatcagatcctaatgcatgttatagatgtggatgtacggctttacatgagtacttttataattatagatcagtcaacggaaaatacaagtatagatacaacggttactatcaatattatttatctagcgattatgaaaattataatgaatattattatgatgattatgatagaactggtatgaacagtgagagtgataatatatcaatcaaaacagaatatgaattctatgatgaaacacaagatcaaagtacacaactagtaggttacgacattaaactcaaaaccaatgaggatgattttatggctatgatagatcagtgggtgtccatgattatatagatgaatcaattaataaagtagtatatggaagagagtctcacgtaagatggcgggatatatggcaagaacataatgatggcgtatacagtataggaaaggagtgcatagataatatatacgaagacaaccataccgtagacgaattctacaagatagacagcgtatcagatgtagatgacgcggaacacatatctccgataactaatgatgtatctacacaaacatgggaaaagaaatcagagttagatagatacatggaaatgtatcctcgtcatagatatagtaagcattctgtctttaagggattttctgacaaagttagaaaaaatgatttagacatgaatgtggtaaaagaattactttctaacggtgcatctctaacaattaaggatagcagtaataaggatccaataaccgtttattttcgaagaacgataatgaatttagaaatgattgatgaacgaaagtatatagtacactcctatctaaaaaattataaaaatttcgattatccatttttcaggaagttagttttgactaataaacattgtctcaacaattattataatataagcgacagcaaatatggaacaccgctacatatattggcgtctaataaaaaattaataactcctaattacatgaagttattagtgtataacggaaatgatataaacgcacgaggtgaagatacacaaatgcgaactccattacacaaatatttgtgtaaatttgtatatcataatattgaatatggtatccgatactataatgaaaagattatagacgcatttatagagttaggagccgatctaactattccaaatgacgatggaatgataccagtagtttactgtatacactcaaatgccgaatatggttataacaatattactaacataaagataatacgtaaactacttaatcttagtagacgtgcgtcacataatctatttagagatcgagtcatgcacgattatataagtaatacatatattgatcttgagtgtttagatattattagatcgttggatggattcgatatcaatggttactttgaaggacgtacaccacttcattgcgctatacaacataacttcactcagattgctaagtacttattagatcgaggagctgatatagtcgtacccaacacattgattatacatcagtacatacagtaaatagcatagatatggaggaggatacaaatatttcaaataaagttataaggtacaacactgtcaataatatatgggaaacattacctaacttctggactggaactataaatccaggcgtggtctcgcataaagatgatatatatgttgtatgcgacatcaaagatgaaaaaaatgttaaaacttgtatatttagatataacacgaatacgtataacggatgggaattggtcacgacgacagaaagcagattatcagctctgcatactattctttataacaataccataatgatgttacattgttatgaatcgtatatgttacaagatacatttaatgtgtacactcgcgaatggaatcatatgtgtcatcaacattcgaatagttatatcatgtacaatatactacccatctactaaatataatagaataaaataaatgagtatgatcattttagataacgattgattttatcattaccgcttcattcttatattctttgcttacggaacctatatttagaaacatctactaacgattttttatgcttgcattattaatggtatgtaatatgattgattgtgtacgcaataccaatttgttaagtatgaatacggggtacaaacataaactgaagtttaacattatttatttatgatatatatcgttattgtttggtctataccatggatatctttaaagaactaatcttaaaacacacggatgaaaatgttttgatttctccagtttctattttatctactttatctattctaaatcatggagcagctggttctacagctgaacaactatcaaaatatatagagaatatgaatgagaatacacccgatgacaataatgacatggacgtagatattccgtattgtgcgacactagctaccgcaaataaaatatacggtagcgatagtatcgagttccacgcctccttcctacaaaaaataaaagacgattttcaaactgtaaactttaataatgctaaccaaacaaaggaactaatcaacgaatgggttaagacaatgacaaatggtaaaattaattccttattgactagtccgctatccattaatactcgtatgacagttgttagcgccgtccattttaaagcaatgtggaaatatccattttctaaacatcttacatatacagacaagttttatatttctaagaatatagttaccagtgttgatatgatggtgagcactgagaataacttgcaatatgtacatattaatgaattattcggaggattctctattatcgatattccatacgagggaaactctagtatggtaattatactaccggacgacatagaaggtatatataacatagaaaaaaatataacagatgaaaaatttaaaaaatggtgtggtatgttatctactaaaagtatagacttgtatatgccaaagtttaaagtggaaatgacagaaccgtataatctggtaccgattttagaaaatttaggacttactaatatattcggatattatgcagattttagcaagatgtgtaatgaaactatcactgtagaaaaatttctacatacgacgtttatagatgttaatgaggagtatacagaagcatcggccgttacaggagtatttatgactaacttttcgatggtatatcgtacgaaggtctacataaaccatccattcatgtacatgattaaagacaacacaggacgtatactttttatagggaaatactgctatccgcaataaatataaacaaatagacttttatcacgtttatctatgtctaaatattacaaatagtaatagtataaactaaagctgataatacttaaaaaaataataatatcatttacaattaatagtataaactaaaaattaaacaaatcgttattataagtaatatcaaaatgatgatatacggattaatagcgtgtcttatattcgtgacttcatccatcgctagtccactttatattcccgttattccacccatttcggaagataaatcgttcaatagtgtagaggtattagtttccttgtttagagatgaccaaaaagactatacggtaacttctcagttcaataactacactatcgataccaaagactggactatcggcgtactatccacacctgatggtttggatataccattgactaatataacttattggtcacggtttactataggtcgtgcattgttcaaatcagagtctgaggatattttccaaaagaaaatgagtattctaggtgtttctatagaatgtaagaagtcgtcgacattacttacttttttgaccgtgcgtaaaatgactcgagtatttaataaatttccagatatggcttattatcgaggagactgtttaaaagccgtttatgtaacaatgacttataaaaatactaaaactggagagactgattacacgtacctctctaatggggggttgcctgcatactatcgtaatggggtcgatggttgattattgattagtatattccttattctttttattcacacaaaaagaacatttttataaacatgaaaccactgtctaaatgtaattatgatcttgatttatagatgaagatcagcctttagaggattttaaccagtatgtttaatatgaaaaaaataaacataacatattttgagattaagcgctattgtgcaagattatattagaatcaaattaatctttcatacgagaaaaataacgacatacgtcgtcaacaaattaaactttttatttattagttaactagcttatagaacttgctcattgttatgtttctaaaacgggtacgacatataggacaattatccgacgcaccggtttctcttcgtgttttatgccatatattgatgcatgttatgcaaaatatatgagtacacgaatccaataaaccaaagtatctatcgttttgagtaaacaacttcatagcaaattccacattctttttctttacttactctatacacgtcctcgtatttatccagtattttgatgatatccaactcagaaatggttgttgtattattgggtgtattgggagtataggtattattagctatgtaccaatttaccaaccctcttaatattgattgaacaatcacatcggttatccaatcaataaccacattaataactaaattgtagtgtatatatagaccatatatgtttctatttttttgacagttacgtatagtttcagtaagttttgattgttgtattcctgtatctctagataagttagtcatatagtcccttccggcgatacgttttttccaagcccgaaattgattagccaaatgtgtatttatttttgtgatattgatataatatgtaatgttattaatatttcggataatgcatactgttagtcttatatcatttggttcatctatgtattgtaatattgttacatgatctatagatgatgtattgattttggcaggatcgaattccatatccgcgactaaacagtgaaaaaaatgtaaatactttttaaattttaaattagtaaaacttttttttattttttatgattccaaaaatactgaatacaaagtcctaaattataaatatggagatcatactaccacaacttattattatgcatactcagccggtgtaatagatagatatatataattctattacaccggcagacaattaccgatcggtatttgtcgttaccaacataccgtataatatgtaatatacaattccataacccattgacagttgttatacatcaaaattgcaattcttttgattacgatgttataagaatgtagttaattgatgtatgatgttaatgtgtcctctttcctcttataacatcgtaatcaaaaacttttttataatatatacctaataatgtgtcttaatagttctcgtgattcgtcaaacaatcattcttataaaatataataaagcaacgtaaaacacataaaaataagcgtaactaataagacaatggatatttacgacgataaaggtctacagactattaaactgtttaataatgaatttgattgtataaggaatgacatcagagaattatttaaacatgtaactgattccgatagtatacaacttccgatggaagacaattctgatattatagaaaatatcagaaaaatactatatagacgattaaaaaatgtagaatgtgttgacatcgatagtacaataacttttatgaaatacgatccaaatgatgataataagcgtacgtgttctaattgggtacccttaactaataactatatggaatattgtctagtaatatatttggaaacaccgatatgtggaggcaaaataaaattataccaccctacaggaaatataaagtcggataaggatattatgtttgcaaagactctagactttaaatcaaagaaagtgttaactggacgtaaaacaattgccgttctagacatatccgtttcatataatagatcaatgactactattcactacaacgacgacgttgatatagatatacatactgataaaaatggaaaagagttatgttattgttatataacaatagatgatcattacttggttgatgtggaaactataggagttatagtcaatagatctggaaaatgtctgttagtaaataaccatctaggtataggtatcgttaaagataaacgtataagcgatagttttggagatgtatgtatggatacaatatttgacttttctgaagcacgagagttattttcattaactaatgatgataacaggaatatagcatgggacactgataaactagacgatgatacagatatatggactcccgtcacagaagatgattacaaatttctttctagactagtattgtatgcaaaatctcaatcggatactgtattcgactattatgttcttactggtgatacggaaccacccactgtattcattttcaaggtaactagattttactttaatatgccgaaataaaaaatttttgtataatatctagaggtagaggtattgtttagataaatacaaataacatagatacatcgcatacttagcatttttataaatatacataagacatacactttatacattttttttgtaaaaatactcataaaaaaatttataaaaattatggcacaaccatatcttgtataggtagtttagttcgtcgagtgaacctataaacagataatagacaacacgtaataataataatgcctactaatacaagcataataccgggagatgggatatatgacgttgtagtgtttgggttttctgaacgttgatagtctactaatactacatgctgacatctaatgcctgtataaccatgagagcatctacaatacataccgtcaatatctctagcgtggatacagtcaccgtgtaaacaatatccatctccctctggaccgcataatctgatagctggaatatctgttgtagcgtttgtaatttctggcgatgtcgtttcgatagcgttaccactatcggcgaatgatctgattatcatagcagcgaacaacaacatcagatatttcatcgacatttttgatggattttgtgtttatgctgtttctcagtgtgtgtttatgacaagattgggaattttatattattaattcagtaatataaactaataatatattgttaattgtgtaaataatataaaaataacaatacaatattgaatgtgttgctgttaaaaatgatcataaacacggagtttattttatatgtctcgcataaacattactaaaaaaatatattgttctgtttttctttcacatctttaattatgaaaaagtaaatcattatgagatggacgagattgtacgcatcgttcgcgacagtatgtggtacatacctaacgtatttatggacgacggtaagaatgaaggtcacgtttctgtcaacaatgtctgtcatatgtatttcacgttctttgatgtggatacatcgtctcatctgtttaagctagttattaaacactgcgatctgaataaacgaggtaactctccattacattgctatacgatgaatacacgatttaatccatctgtattaaagatattgttacaccacggcatgcgtaactttgatagcaaggatgaaaaaggacaccactatcaatcgataacaagatctttgatatactaacggacaccattgatgactttagtaaatcatccgatctattgctgtgttatcttagatataaattcaatgggagcttaaactattacgttctgtacaaaggatccgacgaggatgaactcacttctcttcattactactgtaaacacatatccacgttctacaaaagcaattattacaagttaagtcacactaagatgcgagccgagaagcgattcatctacgcgataatagattatggagcaaacattaacgcggttacacacttaccttcaacagtataccaaacatagtcctcgtgtggtgtatgctcttttatctcgaggagccgatacgaggatacgtaataatcttgattgtacacccatcatggaacgattgtgcaacaggtcatattctcataatgttactcaattggcacgaacaaaaggaagaaggacaacatctactttatctattcataaaacataatcaaggatacactctcaatatactacggtatctactagataggttcgacattcagaaagacgaatactataataccgcctttcaaaattgtaacaacaatgttgcctcatacatcggatacgacatcaaccttccgactaaagacggtattcgacttggtgtttgaaaacagaaacatcatatacaaggcggatgttgtgaatgacatcatccaccacagactgaaagtatctctacctatgattaaatcgttgttctacaagatgtctctccctacgacgattactacgtaaagaagataatagcctactgcctattaagggacgagtcattcgcggaactacatagtaaattctgtttaaacgaggactataaaagtgtatttatgaaaaatatatcattcgataagatagattccatcatcgtgacataagtcgccttaaagagattcgaatctccgacaccgacctgtatacggtatcacagctatcttaaagccatacattcagacagtcacatttcatttcccatgtacgacgatctcatagaacagtgccatctatcgatggagcgtaaaagtaaactcgtcgacaaagcactcaataaattagagtctaccatcggtcaatctagactatcgtatttgcctccggaaattatgcgcaatatcatctaaacagtatgttgtacgaaaagaaccattacaaatattatccatgatagaaagaaaatatctatatgattggagaagtaggaaacaggaacaagacgacgattactacattattaaatcatgaagtccgtattatactcgtatatattgtttctctcatgtataataataaacggaagagatatagcaccgcatgcaccatccgatggaaagtgtaaagacaacgaatacaaacgccataatttgtgtccgggaacatacgcttccagattatgcgatagcaagactaacacacaatgtacgccgtgtggttcgggtaccttcacatctcgcaataatcatttacccgcttgtctaagttgtaacggaagacgcgaccgtgtaacacgactcacaatagaatctgtgaatgctctcccggatattattgtcttctcaaaggatcatccggatgcaaggcatgtgtttcccaaacaaaatgtggaataggatacggagtatccggagacgtcatctgttctccgtgtggtctcggaacatattctcacaccgtctcttccgcagataaatgcgaacccgtacccagtaatacctttaactatatcgatgtggaaattaatctgtatccagttaacgaccactaccggtctcagcgaatccatctcaacgtcggaactaactattactatgaatcataaagactgtaatcccgtatttcgtgaggaatacttctccgtccttaataaggtagcaacttcaggtttctttacaggagaaaggtgtgcactctgaatttcgagattaaatgcaataacaaaaatttttcctccaaacagttaacgaaagcaaagaatgatgacggtatcatgccgcattcggagactgtctatctagcgtcgacatctatatactatatagtaataccaatactcaagactacgaaactgatacaatctcttatcatgtgggtaatgttctcgatgtcgatagccatatgcccggtagttgcgatatacataaactgatcactaattccaaacccacccgctttttatagtaagtttttcacccataaataataaatacaataattaatttctcgtaaaagtagaaaatatattctaatttattgcacggtaaggaagtagaatcataaagaacagtactcaatcaatagcaatcatgaaacaatatatcgtcctggcatgcatgtgcctgccagtcttcagcaatcatcctcatcctcctcctcgtgtacggaagaagaaaacaaacatcatatgggaatcgatgttattatcaaagtcacaaagcaagaccaaacaccgaccaatgataagatttgccaatccgtaacggaaattacagagtccgagtcagatccagatcccgaggtggaatcagaagatgattccacatcagtcgaggatgtagatcctcctaccacttattactccatcatcggtggaggtctgagaatgaactttggattcaccaaatgtcctcagattaaatccatctcagaatccgctgatggaaacacagtgaatgctagattgtccagcgtgtccccaggacaaggtaaggactctcccgcgatcactcatgaagaagctctggctatgatcaaagactgtgaggtgtctatcgacatcagatgtagcgaagaagagaaagacagcgacatcaagacccatccagtactcgggtctaacatctctcataagaaagtgagttacgaagatatcatcggttcaacgatcgtcgatacaaaatgtgtcaagaatctagagtttagcgttcgtatcggagacatgtgcaaggaatcatctgaacttgaggtcaaggatggatttaagtatgtcgacggatcggcatctgaaggtgcaaccgatgatacttcactcatcgattcaacaaaactcaaagcgtgtgtctgaatcgataactctattcatctgaaattggatgagtagggttaatcgaacgattcaggcacaccacgaattaaaaaagtgtaccggacactatattccggtttgcaaaacaaaaatgttcttaactacattcacaaaaagttacctctcgcgacttcttctttttctgtctcaatagtgtgatacgattatgacactattcctattcctattcctatttcctttcagggtatcacaaaaatattaaacctctttctgatggtctcataaaaaaagttttacaaaaatatttttattctctttctctctttgatggtctcataaaaaaagttttacaaaaatatttttattctctttctctctttgatggtctcataaaaaaagttttacaaaaatatttttattctctttctctctttgatggtctcataaaaaaagttttacaaaaatatttttattctctttctctctttgatggtctcataaaaaaagttttacaaaaatatttttattctctttctctctttgatggtctcataaaaaaagttttacaaaaatatttttattctctttctctctttgatggtctcataaaaaaagttttacaaaaatatttttattctctttctctctttgatggtctcataaaaaaagttttacaaaaatatttttattctctttctctctttgatggtctcataaaaaatattaaacctctttctgatggtgtcactaaaatatttttattctcattctcattttctctttctctcttcaatggagtcataaaatatttttattctctttctctcttcgatggtctcacaaaaatattaaacctctttctgatggtgtcactaaaatatttttattctcattctcattttctctttctctcttcaatggagtcataaaatatttttattctctttctctcttcgatggtctcacaaaaatattaaacctctttctgatggagtcgtaaaaaagttttatctctttctctcttcgatggtctcacaaaaatattaaacctctttctgatggagtcgtaaaaaagttttatctctttctctcttcgatggtctcacaaaaatattaaacctctttctgatggagtcgtaaaaaagttttatctctttctctcttcgatggtctcacaaaaatattaaacctctttctgatggagtcgtaaaaaagttttatctctttctctcttcgatggtctcacaaaaatattaaacctctttctgatggagtcgtaaaaaagttttatctctttctctcttcgatggtctcacaaaaatattaaacctctttctgatggagtcgtaaaaaagttttatctctttctctcttcgatggtctcacaaaaatattaaacctctttctgatggagtcgtaaaaaagttttatctctttctctcttcgatggtctcacaaaaatattaaacctctttctgatggagtcgtaaaaaagttttatctctttctctcttcgatggtctcacaaaaatattaaacctctttctgatggagtcgtaaaaaagttttatctctttctctcttcgatggtctcacaaaaatattaaacctctttctgatggagtcgtaaaaaagttttatctctttctctcttcgatggtctcacaaaaatattaaacctctttctgatggagtcgtaaaaaagttttatctctttctctcttcgatggtctcacaaaaatattaaacctctttctgatggagtcgtaaaaaagttttatctctttctctcttcgatggtctcacaaaaatattaaacctctttctgatggagtcgtaaaaaagttttatctctttctctcttcgatggtctcacaaaaatattaaacctctttctgatggagtcgtaaaaaagttttatctctttctctcttcgatggtctcacaaaaatattaaacctctttctgatggagtcgtaaaaaagttttatctctttctctcttcgatggtctcacaaaaatattaaacctctttctgatggagtcgtaaaaaagttttatctctttctctcttcgatggtctcacaaaaatattaaacctctttctgatggagtcgtaaaaaagttttatctctttctctcttcgatggtctcacaaaaatattaaacctctttctgatggagtcgtaaaaaagttttatctctttctctcttcgatggtctcactaaaatattttttattctctttctgatgcatcaactatttcttaaacaataacgtccaacaacatatactcgtcgagcttatcaacatcccctatgcccatctaggttaccagacaattgtatatcataaaataatgtttataatttacacgttaaaatcatataataaaacgtagatcgtataatattttttggtatataaatgatctagtaaaatccatgtaggggatactgctcacattttttctttggtacaaaatttcacacaagtttttatacagacaaattcttgtccatatattttaaaacattgacttttgtactaagaaaaatatctagatcaactatctctttctctttctctcttcgatggtctcacaaaaatattaaacctctttctgatggagtcgtaaaaaagttttatctctttctctcttcgatggtctcacaaaaatattaaacctctttctgatggagtcgtaaaaaagttttatctctttctctcttcgatggtctcacaaaaatattaaacctctttctgatggagtcgtaaaaaagttttatctctttctctcttcgatggtctcacaaaaatattaaacctctttctgatggagtcgtaaaaaagttttatctctttctctcttcgatggtctcacaaaaatattaaacctctttctgatggagtcgtaaaaaagttttatctctttctctcttcgatggtctcacaaaaatattaaacctctttctgatggagtcgtaaaaaagttttatctctttctccttcgatggtctcacaaaaatattaaacctctttctgatggagtcgtaaaaaagttttatctctttctctcttcgatggtctcacaaaaatattaaacctctttctgatggagtcgtaaaaaagttttatctctttctctcttcgatggtctcacaaaaatattaaacctctttctgatggagtcgtaaaaaagttttatctctttctccttcgatggtctcacaaaaatattaaacctctttctgatggagtcgtaaaaaagttttatctctttctccttcgatggtctcacaaaaatattaaacctctttctgatggagtcgtaaaaaagttttatctctttctctcttcgatggtctcacaaaaatattaaacctctttctgatggagtcgtaaaaaagttttatctctttctctcttcgatggtctcacaaaaatattaaacctctttctgatggtctctataaagcgatcgatctttcttacactctagagtttcctacagtcatgggtcacacatttttttctagacactaaataaaattagtaaaattaaattaattataaaattatatatataatttactaactttagttagataaattaataatatataagttttagtacattaatattatattttaaat

SEQ ID NO: 203 - DNA, 196171 bp, Artificial Sequence
  GLV-0b365
atttaaaatataatattaatgtactaaaacttatatattattaatttatctaactaaagttagtaaattatatatataattttataattaatttaattttactaattttatttagtgtctagaaaaaaatgtgtgacccatgactgtaggaaactctagagtgtaagaaagatcgatcgctttatagagaccatcagaaagaggtttaatatttttgtgagaccatcgaagagagaaagagataaaacttttttacgactccatcagaaagaggtttaatatttttgtgagaccatcgaagagagaaagagataaaacttttttacgactccatcagaaagaggtttaatatttttgtgagaccatcgaaggagaaagagataaaacttttttacgactccatcagaaagaggtttaatatttttgtgagaccatcgaaggagaaagagataaaacttttttacgactccatcagaaagaggtttaatatttttgtgagaccatcgaagagagaaagagataaaacttttttacgactccatcagaaagaggtttaatatttttgtgagaccatcgaagagagaaagagataaaacttttttacgactccatcagaaagaggtttaatatttttgtgagaccatcgaaggagaaagagataaaacttttttacgactccatcagaaagaggtttaatatttttgtgagaccatcgaagagagaaagagataaaacttttttacgactccatcagaaagaggtttaatatttttgtgagaccatcgaagagagaaagagataaaacttttttacgactccatcagaaagaggtttaatatttttgtgagaccatcgaagagagaaagagataaaacttttttacgactccatcagaaagaggtttaatatttttgtgagaccatcgaagagagaaagagataaaacttttttacgactccatcagaaagaggtttaatatttttgtgagaccatcgaagagagaaagagataaaacttttttacgactccatcagaaagaggtttaatatttttgtgagaccatcgaagagagaaagagaaagagatagttgatctagatatttttcttagtacaaaagtcaatgttttaaaatatatggacaagaatttgtctgtataaaaacttgtgtgaaattttgtaccaaagaaaaaatgtgagcagtatcccctacatggattttactagatcatttatataccaaaaaatattatacgatctacgttttattatatgattttaacgtgtaaattataaacattattttatgatatacaattgtctggtaacctagatgggcataggggatgttgataagctcgacgagtatatgttgttggacgttattgtttaagaaatagttgatgcatcagaaagagaataaaaaatattttagtgagaccatcgaagagagaaagagataaaacttttttacgactccatcagaaagaggtttaatatttttgtgagaccatcgaagagagaaagagataaaacttttttacgactccatcagaaagaggtttaatatttttgtgagaccatcgaagagagaaagagataaaacttttttacgactccatcagaaagaggtttaatatttttgtgagaccatcgaagagagaaagagataaaacttttttacgactccatcagaaagaggtttaatatttttgtgagaccatcgaagagagaaagagataaaacttttttacgactccatcagaaagaggtttaatatttttgtgagaccatcgaagagagaaagagataaaacttttttacgactccatcagaaagaggtttaatatttttgtgagaccatcgaagagagaaagagataaaacttttttacgactccatcagaaagaggtttaatatttttgtgagaccatcgaagagagaaagagataaaacttttttacgactccatcagaaagaggtttaatatttttgtgagaccatcgaagagagaaagagataaaacttttttacgactccatcagaaagaggtttaatatttttgtgagaccatcgaagagagaaagagataaaacttttttacgactccatcagaaagaggtttaatatttttgtgagaccatcgaagagagaaagagataaaacttttttacgactccatcagaaagaggtttaatatttttgtgagaccatcgaagagagaaagagataaaacttttttacgactccatcagaaagaggtttaatatttttgtgagaccatcgaagagagaaagagataaaacttttttacgactccatcagaaagaggtttaatatttttgtgagaccatcgaagagagaaagagataaaacttttttacgactccatcagaaagaggtttaatatttttgtgagaccatcgaagagagaaagagataaaacttttttacgactccatcagaaagaggtttaatatttttgtgagaccatcgaagagagaaagagataaaacttttttacgactccatcagaaagaggtttaatatttttgtgagaccatcgaagagagaaagagataaaacttttttacgactccatcagaaagaggtttaatatttttgtgagaccatcgaagagagaaagagataaaacttttttacgactccatcagaaagaggtttaatatttttgtgagaccatcgaagagagaaagagaataaaaatattttatgactccattgaagagagaaagagaaaatgagaatgagaataaaaatattttagtgacaccatcagaaagaggtttaatatttttgtgagaccatcgaagagagaaagagaataaaaatattttatgactccattgaagagagaaagagaaaatgagaatgagaataaaaatattttagtgacaccatcagaaagaggtttaatattttttatgagaccatcaaagagagaaagagaataaaaatatttttgtaaaactttttttatgagaccatcaaagagagaaagagaataaaaatatttttgtaaaactttttttatgagaccatcaaagagagaaagagaataaaaatatttttgtaaaactttttttatgagaccatcaaagagagaaagagaataaaaatatttttgtaaaactttttttatgagaccatcaaagagagaaagagaataaaaatatttttgtaaaactttttttatgagaccatcaaagagagaaagagaataaaaatatttttgtaaaactttttttatgagaccatcaaagagagaaagagaataaaaatatttttgtaaaactttttttatgagaccatcaaagagagaaagagaataaaaatatttttgtaaaactttttttatgagaccatcagaaagaggtttaatatttttgtgataccctgaaaggaaataggaataggaataggaatagtgtcataatcgtatcacactattgagacagaaaaagaagaagtcgcgagaggtaactttttgtgaatgtagttaagaacatttttgttttgcaaaccggaatatagtgtccggtacacttttttaattcgtggtgtgcctgaatcgttcgattaaccctactcatccaatttcagatgaatagagttatcgattcagacacacgctttgagttttgttgaatcgatgagtgaagtatcatcggttgcaccttcagatgccgatccgtcgacatacttaaatccatccttgacctcaagttcagatgattccttgcacatgtctccgatacgaacgctaaactctagattcttgacacattttgtatcgacgatcgttgaaccgatgatatcttcgtaactcactttcttatgagagatgttagacccgagtactggatgggtcttgatgtcgctgtctttctcttcttcgctacatctgatgtcgatagacacctcacagtctttgatcatagccagagcttcttcatgagtgatcgcgggagagtccttaccttgtcctggggacacgctggacaatctagcattcactgtgtttccatcagcggattctgagatggatttaatctgaggacatttggtgaatccaaagttcattctcagacctccaccgatgatggagtaataagtggtaggaggatctacatcctcgactgatgtggaatcatcttctgattccacctcgggatctggatctgactcggactctgtaatttccgttacggattggcaaatcttatcattggtcggtgtttggtcttgctttgtgactttgataataacatcgattcccatatgatgtttgttttcttcttccgtacacgaggaggaggatgaggatgattgctgaagactggcaggcacatgcatgccaggacgatatattgtttcatgattgctattgattgagtactgttctttatgattctacttccttaccgtgcaataaattagaatatattttctacttttacgagaaattaattattgtatttattatttatgggtgaaaaacttactataaaaagcgggtgggtttggaattagtgatcagtttatgtatatcgcaactaccgggcatatggctatcgacatcgagaacattacccacatgataagagattgtatcagtttcgtagtcttgagtattggtattactatatagtatatagatgtcgacgctagatagacagtctccgaatgcggcatgataccgtcatcattctttgctttcgttaactgtttggaggaaaaatttttgttattgcatttaatctcgaaattcagagtgcacacctttctcctgtaaagaaacctgaagttgctaccttattaaggacggagaagtattcctcacgaaatacgggattacagtctttatgattcatagtaatagttagttccgacgttgagatggattcgctgagaccggtagtggtcgttaactggatacagattaatttccacatcgatatagttaaaggtattactgggtacgggttcgcatttatctgcggaagagacggtgtgagaatatgttccgagaccacacggagaacagatgacgtctccggatactccgtatcctattccacattttgtttgggaaacacatgccttgcatccggatgatcctttgagaagacaataatatccgggagagcattcacagattctattgtgagtcgtgttacacggtcgcgtcttccgttacaacttagacaagcgggtaaatgattattgcgagatgtgaaggtacccgaaccacacggcgtacattgtgtgttagtcttgctatcgcataatctggaagcgtatgttcccggacacaaattatggcgtttgtattcgttgtctttacactttccatcggatggtgcatgcggtgctatatctcttccgtttattattatacatgagagaaacaatatatacgagtataatacggacttcatgatttaataatgtagtaatcgtcgtcttgttcctgtttcctacttctccaatcatatagatattttctttctatcatggataatatttgtaatggttcttttcgtacaacatactgtttagatgatattgcgcataatttccggaggcaaatacgatagtctagattgaccgatggtagactctaatttattgagtgctttgtcgacgagtttacttttacgctccatcgatagatggcactgttctatgagatcgtcgtacatgggaaatgaaatgtgactgtctgaatgtatggctttaagatagctgtgataccgtatacaggtcggtgtcggagattcgaatctctttaaggcgacttatgtcacgatgatggaatctatcttatcgaatgatatatttttcataaatacacttttatagtcctcgtttaaacagaatttactatgtagttccgcgaatgactcgtcccttaataggcagtaggctattatcttctttacgtagtaatcgtcgtagggagagacatcttgtagaacaacgatttaatcataggtagagatactttcagtctgtggtggatgatgtcattcacaacatccgccttgtatatgatgtttctgttttcaaacaccaagtcgaataccgtctttagtcggaaggttgatgtcgtatccgatgtatgaggcaacattgttgttacaattttgaaaggcggtattatagtattcgtctttctgaatgtcgaacctatctagtagataccgtagtatattgagagtgtatccttgattatgttttatgaatagataaagtagatgttgtccttcttccttttgttcgtgccaattgagtaacattatgagaatatgacctgttgcacaatcgttccatgatgggtgtacaatcaagattattacgtatcctcgtatcggctcctcgagataaaagagcatacaccacacgaggactatgtttggtatactgttgaaggtaagtgtgtaaccgcgttaatgtttgctccataatctattatcgcgtagatgaatcgcttctcggctcgcatcttagtgtgacttaacttgtaataattgcttttgtagaacgtggatatgtgtttacagtagtaatgaagagaagtgagttcatcctcgtcggatcctttgtacagaacgtaatagtttaagctcccattgaatttatatctaagataacacagcaatagatcggatgatttactaaagtcatcaatggtgtccgttagtatatcaaagatcttgttatcgattgatagtggtgtcctttttcatccttgctatcaaagttacgcatgccgtggtgtaacaatatctttaatacagatggattaaatcgtgtattcatcgtatagcaatgtaatggagagttacctcgtttattcagatcgcagtgtttaataactagcttaaacagatgagacgatgtatccacatcaaagaacgtgaaatacatatgacagacattgttgacagaaacgtgaccttcattcttaccgtcgtccataaatacgttaggtatgtaccacatactgtcgcgaacgatgcgtacaatctcgtccatctcataatgatttactttttcataattaaagatgtgaaagaaaaacagaacaatatatttttttagtaatgtttatgcgagacatataaaataaactccgtgtttatgatcatttttaacagcaacacattcaatattgtattgttatttttatattatttacacaattaacaatatattattagtttatattactgaattaataatataaaattcccaatcttgtcataaacacacactgagaaacagcataaacacaaaatccatcaaaaatgtcgatgaaatatctgatgttgttgttcgctgctatgataatcagatcattcgccgatagtggtaacgctatcgaaacgacatcgccagaaattacaaacgctacaacagatattccagctatcagattatgcggtccagagggagatggatattgtttacacggtgactgtatccacgctagagatattgacggtatgtattgtagatgctctcatggttatacaggcattagatgtcagcatgtagtattagtagactatcaacgttcagaaaacccaaacactacaacgtcatatatcccatctcccggtattatgcttgtattagtaggcattattattattacgtgttgtctattatctgtttataggttcactcgacgaactaaactacctatacaagatatggttgtgccataatttttataaatttttttatgagtatttttacaaaaaaaatgtataaagtgtatgtcttatgtatatttataaaaatgctaagtatgcgatgtatctatgttatttgtatttatctaaacaatacctctacctctagatattatacaaaaattttttatttcggcatattaaagtaaaatctagttaccttgaaaatgaatacagtgggtggttccgtatcaccagtaagaacataatagtcgaatacagtatccgattgagattttgcatacaatactagtctagaaagaaatttgtaatcatcttctgtgacgggagtccatatatctgtatcatcgtctagtttatcagtgtcccatgctatattcctgttatcatcattagttaatgaaaataactctcgtgcttcagaaaagtcaaatattgtatccatacatacatctccaaaactatcgcttatacgtttatctttaacgatacctatacctagatggttatttactaacagacattttccagatctattgactataactcctatagtttccacatcaaccaagtaatgatcatctattgttatataacaataacataactcttttccatttttatcagtatgtatatctatatcaacgtcgtcgttgtagtgaatagtagtcattgatctattatatgaaacggatatgtctagaacggcaattgttttacgtccagttaacactttctttgatttaaagtctagagtctttgcaaacataatatccttatccgactttatatttcctgtagggtggtataattttattttgcctccacatatcggtgtttccaaatatattactagacaatattccatatagttattagttaagggtacccaattagaacacgtacgcttattatcatcatttggatcgtatttcataaaagttattgtactatcgatgtcaacacattctacattttttaatcgtctatatagtatttttctgatattttctataatatcagaattgtcttccatcggaagttgtatactatcggaatcagttacatgtttaaataattctctgatgtcattccttatacaatcaaattcattattaaacagtttaatagtctgtagacctttatcgtcgtaaatatccattgtcttattagttacgcttatttttatgtgttttacgttgctttattatattttataagaatgattgtttgacgaatcacgagaactattaagacacattattaggtatatattataaaaaagtttttgattacgatgttataagaggaaagaggacacattaacatcatacatcaattaactacattcttataacatcgtaatcaaaagaattgcaattttgatgtataacaactgtcaatgggttatggaattgtatattacatattatacggtatgttggtaacgacaaataccgatcggtaattgtctgccggtgtaatagaattatatatatctatctattacaccggctgagtatgcataataataagttgtggtagtatgatctccatatttataatttaggactttgtattcagtatttttggaatcataaaaaataaaaaaaagttttactaatttaaaatttaaaaagtatttacatttttttcactgtttagtcgcggatatggaattcgatcctgccaaaatcaatacatcatctatagatcatgtaacaatattacaatacatagatgaaccaaatgatataagactaacagtatgcattatccgaaatattaataacattacatattatatcaatatcacaaaaataaatacacatttggctaatcaatttcgggcttggaaaaaacgtatcgccggaagggactatatgactaacttatctagagatacaggaatacaacaatcaaaacttactgaaactatacgtaactgtcaaaaaaatagaaacatatatggtctatatatacactacaatttagttattaatgtggttattgattggataaccgatgtgattgttcaatcaatattaagagggttggtaaattggtacatagctaataatacctatacacccaataatacaacaaccatttctgagttggatatcatcaaaatactggataaatacgaggacgtgtatagagtaagtaaagaaaaagaatgtggaatttgctatgaagttgtttactcaaaacgatagatactttggtttattggattcgtgtactcatatattttgcataacatgcatcaatatatggcataaaacacgaagagaaaccggtgcgtcggataattgtcctatatgtcgtacccgttttagaaacataacaatgagcaagttctataagctagttaactaataaataaaaagtttaatttgttgacgacgtatgtcgttatttttctcgtatgaaagattaaattcaattcaattcgttgtttctaatataatctgccgtattggatggattctcaagacaattgcatttagattatattatcatgaataaaaatagtagcacgcactacttcagccaaatattcttttttgaaacgccatctatcgtagtgaggacacaagtgaacctataattatcaaatttattagtatcagtcacatgaaggactttctgtagagtgacgattctaccatctatggtactaacggtttcatcctccttgataccctcacccaaatgttctataaatttagcatcctcgtccgatctcatatcctttgccaaccaatacatgtagctaaaattaggcataaatttcacacatccagtgcaacgaaattctccagaagatgttacgatgtttaggttaggacatttgatttcgtcggcattaacatatgggtgaacacacccatacatgaaagcgatgagaaataggattctcatcttgccaaaatatcactagaaaaaatttatttatcaattttaaaggtataaaaaatacttattgttgctcgaatattttgtatttgatggtatacggaagattagaaatgtaggtattatcatcaactgattctatggttttatgtattctatcatgtttcactattgcgtcggaaataatatcatatgcttccacatatattttattttgttttaactcataatactcacgtaattctggattattggcatatctatgaataattttagctccatgatcagtaaatattaatgagaacatagtattaccacctaccattatttttttcatttcgttcaattcttgattgcaaagatctatataatcattatagcgttgacttatggactctggaatcttagacgatgtacagtcatctataatcatggcatatttaatacattgttttatagcatagtagttatctacgatgttagatatttctctcaatgaatcaatcacacaatctaatgtaggtttatgacataatagcattttcagcagttcaatgtttctagattcgttgatggcaatggctatacatgtatatccgttatttgatctaatgttgacatctgaaccggattctagcagtaaagatactagagattgtttattatatctaacagccttgtgaagaagtgtttctcctcgtttgtcaatcatgttaatgtctttaagataaggtaggcaaatgtttatagtactaagaattgggcaagcataagacatgtcacaaagaccctttttgtatgtataagtgtaaaaattataacattcatagttggatttacataggtgtccaatcgggatctctccatcatcgagataattgatggcatctcccttccttttttagtagatatttcatcgtgtaagaatcaatattaatatttctaaagtattcgtgtatagcctctttatttaccacagttccatattccactagagggatatcgccgaatgtcatatactcaattagtatatgttggaggacatccgagttcattgttttcaatatcaaaaagatggtttccttatcatttctccatagtggtacaatactacacattattccgtgcggctttccattttccaaaaacaatttgaccaaatctaaatctacatctttattgtatctataatcactatttagataatcagccataattactcgagtgcaacatgttagatcgtctatatatgaataagcagtgttatctattcctttcattaacaatttaacgatgtctatatctatatgagatgacttaatataatattgaagagctgtacaatagtttttatctatagaagacggcttgattccgtgattaattagacatttaacaacttccggacgcacatatgctctcgtatccgactttgaatacagatgagagatgatatacagatgcaatacggtaccgcaatttcgtagttgataatcatcatacgcgtatcagtactcgtcctcataaagaacactgcagccattttctatgaacaaatcaataattttaggaacaggatcattgtcattacataattttctataactgaacgatggttttcacatttaacactcaagtcaaatccatgttctaccaacacctttatcaagtcaacgtctacatttttggatttcatatagctgaatatattaaagtcatttatgttgctaaatccagtggcttctagtagagccatcgctatatcctttaactttaacatgtctactatttgtgtattcttctaatggggtagctgtctccaatttttgcgtaatggattagtgccactgtctagtagtagtttgacgacctcgacattattacaatgctcattaaaaaggtatgcgtgtaaagcattattcttgaattggttcctggtatcattaggatctctgtctctcaacatctgtttaagttcatcgagagccacctcctcattttccagatagtcaaacattttgactgaatgagctactgtgaactctatacacccacacaactaatgtcattaaatattatttttttgaatgtatttataccatgtcaaaaacttgtacaattattaataaaaataatttagtgtttaaattttaccagttccagattttacacctccgttaaccccactttttacaccactggacgatcctcctccccacattccaccgccaccagatgtataagttttagatcctttattactaccatcatgtccatggataaagacactccacatgccgccactactaccccctttagaagacatattaataagacttaaggacaagtttaacaataaaattaatcacgagtaccctactaccaacctacactattatatgattatagtttctatttttacagtaccttaactaaagtctctagtcacaagagcaatactaccaacctacactattatatgattatagtttctatttttataggaacgcgtacgagaaaatcaaatgtctaatttctaacggtagtgttgataaacgattatcgtcaatggatacctcctctatcatgtcgtctattttcttactttgttctattaacttattagcattatatattatttgattataaaacttatattgcttattagcccaatctgtaaatatcggattattaacatatcgtttctttgtaggtttatttaacatgtacatcactgtaagcatgtccgtaccatttattttaatttgacgcatatccgcaatttctttttcgcagtcggttataaattctatatatgatggatacatgctacatgtgtacttataatcgactaatatgaagtacttgatacatattttcagtaacgatttattattaccacctatgaataagtacctgtgatcgtctaggtaatcaactgttttcttaatacattcgatggttggtaatttactcagaataatttccaatatcttaatatataattctgctatttctgggatatatttatctgccagtataacacaaatagtaatacatgtaaacccatattttgttattatattaatgtctgcgccattatctattaaccattctactaggctgacactatgcgacttaatacaatgataaagtatactacatccatgtttatctattttgtttatatcatcaatatacggcttacaaagttttagtatcgataacacatccaactcacgcatagagaaggtagggaataatggcataatatttattaggttatcatcattgtcattatctacaactaagtttccattttttaaaatatactcgacaactttaggatctctattgccaaatttttgaaaatatttatttatatgcttaaatctatataatgtagctccttcatcaatcatacatttaataacattgatgtatactgtatgataagatacatattctaacaatagatcttgtatagaatctgtatatcttttaagaattgtggatattaggatattattacgtaaactattacacaattctaaaatataaaacgtatcacggtcgaataatagttgatcaactatataattatcgattttgtgatttttcttcctaaactgtttacgtaaatagttagatagaatattcattagttcatgaccactatagttactatcgaataacgcgtcaaatatttcccgtttaatatcgcatttgtcaagataataatagagtgtggtatgttcacgataagtataataacgcatctcttttttgtgtgaaattaaatagtttatcacgtccaaagatgtagcataaccatcttgtgacctagtaataatataataatagagaactgttttacccattctatcatcataatcagtggtgtagtcgtaatcgtaatcgtctaattcatcatcccaattataatattcaccagcacgtctaatctgttctattttgatcttgtatccatactgtatgttgctacatgtaggtattcctttatccaataatagtttaaacacatctacattgggatttgatgttgtagcgtatttctctacaatattaataccatttttgatactatttatttctatacctttcgaaattagtaatttcaataagtctatatcgatgttatcagaacatagatattcgaatatatcaaaatcattgatatttttatagtcgactgacgacaataacaaaatcacaacatcgtttttgatattattatttttcttggtaacgtatgcctttaatggagtttcaccatcatactcatataatggatttgcaccactttctatcaatgattgtgcactgctggcatcgatgttaaatgttttacaactatcatagagtatcttatcgttaaccatgattggttgttgatgctatcgcattttttggtttctttcatttcagttatgtatggatttagcacgtttgggaagcatgagctcatatgatttcagtactgtagtgtcagtactattagtttcgatcagatcaatgtctagatctatagaatcaaaacacgataggtcagaagataatgaatatctgtacgcttctttttgtactgtaacttctggttttgttagatggttgcatcgtgctttaacatcaatggtacaaattttatcctcgctttgtgtatcatattcgtctctagtataaaattctatattcagattatcatgcgatgtgtatacgctaacggtatcaataaacggagcacaccatttagtcataacagtaatccaaaattttttaaagtatatcttaacgaaagaagttgtgtcattgtctacggtgtatggtactagatcctcataagtgtatatatctagagtaatgtttaatttattaaatggttgataatatggatcctcatgacaatttccgaagatggaaatgagatatagacatgcaataaatctaatcgaagacatggttactccttaaaaaaatacgaataatcaccttggctatttagtaagtgtcatttaacactatactcatattaatccatggactcataatctctatacgggattaacggatgttctatatacggggatgagtagttttcttctttaactttatactttttactaatcatatttagactgatgtatgggtaatagtgtttaaagagttcgttctcatcatcagaataaatcaatatctctgtttttttgttatacagatgtattacagcctcatatattacgtaatagaacgtgtcatctaccttattaactttcaccgcatagttgtttgcaaatacggttaatcctttgacctcgtcgatttccgaccaatctgggcgtataatgaatctaaactttaatttcttgtaatcattcgaaataatttttagtttgcatccgtagttatcccctttatgtaactgtaaatttctcaacgcgatatctccattaataatgatgtcgaattcgtgctgtatacccatactgaatggatgaactaacgaatatcaacggcgttaatagtaatttactttttcatctttacatattgggtactagttttactatcataagtttataaattccacaagctactatggaataagccaaccatcttagtataccacacatgtcttaaagtttattaattaattacatgttgttttatatatatcgctacgaatttaaagagaaatcagtttaggaagaaaaaaattatctatctacatcatcacgtctctgtattctacgatagagtgctactttaagatgagacatatccgtgtcatcaaaaatatactccattaaaatgattattccggcagcgaacttgatattggatatatcacaacctttgttaatatctacgacaatagacagcagtcccatggttccataaacagtgagtttatctttctttgaagcgatagtttgtagagatcttataaaaccgtcaaacgacatcgcatttatatctttagctaattcatatatgttaccatcgtaatatctaaccgcgtctatcttaaacgtttccatcgctttaaagacgtttccgatagatggtctcatttcatcagtcatactgagccaacaaatataatcgtgtataacatctttgatagaatcagactctaaagaaaacgaatcggctttattatacgcattcatgataaacttaatgaaaaatgtttttcgttgtttaagttggatgaatagtatgtcttaataattgttattatttcattaattaatatttagtaacgagtacactctataaaaacgagaatgacataactagttatcaaagtgtctaggacgcgtaattttcatatggtatagatcctgtaagcattgtctgtattctggagctattttctttatcgcattagtaagttcagaatatgttataaatttaaatcgaataacgaacatgactttagtaaagtcgtctatattaactcttttattttctagccatcgtaataccatgtttaagatagtatattctctagttactacgatctcatcgttgtctagaatatcacatactgaatctacatccaattttagaaattggtctgtgttacatatctcttctatattattgttgatgtattgtcgtagaaaactattacgtagaccattttctttataaaacgaatatatagtactccaattatctttaccgatatatttgcacacataatccattctctcaatcactacatctttaagattttcgttgttaagatatttggctaaactatataattctattagatcatcaacagaatcagtatatatttttctagatccaaagacgaactctttggcgtcctctataatattcccagaaaagatattttcgtgttttagtttatcgagatctgatctgttcatatacgccatgattgtacggtacgttatgataaccgcataaaataaaaatccattttcatttttaaccaatactattcataattgagattgatgtaatactttgttactttgaacgtaaagacagtacacggatccgtatctccaacaagcacgtagtaatcaaatttggtgttgttaaacttcgcaatattcatcaatttagatagaaacttatactcatcatctgttttaggaatccatgtattattaccactttccaacttatcattatcccaggctatgtttcgtccatcatcgttgcgcagagtgaataattcttttgtattcggtagttcaaatatatgatccatgcatagatcggcaaagctattgtagatgtgatttttcctaaatctaatataaaactcgtttactagcaaacactttcctgatttatcgaccaagacacatatggtttctaaatctatcaagtggtggggatccatagttatgacgcagtaacatagattattacattcttgactgtcgctaatatctaaatatttattgttatcgtattggattctgcatatagatggcttgtatgtcaaagatatagaacacataaccaatttatagtcgcgctttacattctcgaatctaaagttaagagatttagaaaacattatatcctcggatgatgttatcactgtttctggagtaggatatattaaagtctttacagatttcgtccgattcaaataaatcactaaataatatcccacattatcatctgttagagtagtatcattaaatctattatattttatgaaagatatatcactgctcacctctatatttcgtacatttttaaactgtttgtataatatctctctgatacaatcagatatatctattgtgtcggtagacgataccgttacatttgaattaatggtgttccattttacaacttttaacaagttgaccaattcatttctaatagtatcaaactctccatgattaaatattttaatagtatccattttatatcactacggacacaaagtagctgacataaaccattgtataatttttatgttttatgtttattagcgtacacattttggaagttccggcttccatgtatttcctggagagcaagtagatgatgaggaaccagatagtttatatccgtacttgcacttaaagtctacattgtcgttgtatgagtatgatcttttaaacccgctagacaagtatccgtttgatattgtaggatgtggacatttaacaatctgacacgtgggtggatcggaccattctcctcctgaacacaggacaccagagttaccaatcaacgaatatccactattgcaactataagttacaacgctcccatcggtataaaaatcctcgtatccgttatgtcttccgttggatatagatggaggggattggcatttaacagattcacaaataggtgcctcgggattccataccatagatccagtagatcctaattcacaatacgatttagattcaccgatcaaatgatatccgctattacaagagtacgttatactagagccaaagtctactccaccaatatcaagttggccattatcgatatctcgaggcgatgggcatctccgtttaatacattgattaaagagtgtccatccagtacctgtacatttagcatatataggtcccattttttgctttctgtatccaggtagacatagatattctatagtgtctcctatgttgtaattagcattagcatcagtctccacactattcttaaatttcatattaatgggtcgtgacggaatagtacagcatgatagaacgcatcctattcccaacaatgtcaggaacgtcacgctctccaccttcatatttatttatccgtaaaaatgttatcctggacatcgtacaaataataaaaagcccatatatgttcgctattgtagaaattgtttttcacagttgctcaaaaacgatggcagtgacttatgagttacgttacactttggagtctcatctttagtaaacatatcataatattcgatattacgagttgacatatcgaacaaattccaagtatttgattttggataatattcgtattttgcatctgctataattaagatataatcaccgcaagaacacacgaacatctttcctacatggttaaagtacatgtataattctatccatttgtcttccttaactatatatttgtatagataattacgagtctcgtgagtaattccagtaattacatagatgtcgccgtcgtactctacagcataaactatactatgatgtctaggcatgggagacttttttatccaacgatttttagtgaaacattccacatcgtttaatactacatatttttcatacgtggtataaactccacccattacatatatatcatcgtttacgaataccgacgcgcctgaatatctaggagtaattaagtttggaagtcttatccatttcgaagtgccgtgtttcaaatattctgccacacccgttgaaatagaaaattctaatcctcctattacatataactttccatcgttaacacaagtactaacttctgattttaacgacgacatattagtaaccgttttccattttttcgtttcaagatctacccgcgatacggaataaacatgtctattgttaatcatgccgccaataatgtatagacaattatgtaaaacatttgcattatagaattgtctatctgtattaccgactatcgtccaatattctgttctaggagagtaatgggttattgtggatatataatcagagtttttaatgactactatattatgttttataccatttcgtgtcactggctttgtagatttggatatagttaatcccaacaatgatatagcattgcgcatagtattagtcataaacttgggatgtaaaatgttgatgatatctacatcgtttggatttttatgtatccactttaataatatcatagctgtaacatcctcatgatttacgttaacgttttcgtgggataagatagttgtcagttcatcctttgataattttccaaattctggatcggatgtcaccgcagtaatattgttgattatttctgacatcgacgcattatatagttttttaattccatatcttttagaaaagttaaacatccttatacaatttgtggaattaatattatgaatcatagtttttacacatagatctactacaggcggaacatcaattattatggcagcaactagtatcatttctacattgtttatggtgatgtttatcttcttccagcgtatatagtctaatagcgattcaaacgcgtgatagtttataccattcaatataatcgcttcatcctttagatggtgatcctgaattcgtttaaaaaaattatacggagatgccgtaataatttccttattcacttgtataatttccccattgatagaaaatatcacgctttccattcttgaagtactataagtaattatagtataatgtaaaggtttatatattcaatattttttataaaaaaatcattttgacattaattcctttttaaatttccgtctatcatctatagaaacgtattctatgaatttataaaatgcttttacgtgtcctatcgtaggcgatagaaccgctaaaaagcctatcgaatttctacaaaagaatctgttatatggtatagggagagtataaaacattaaatgtccgtacttattaaagtattcagtagccaatcctaactctttcgaatacttattaatggctcttgttctgtacgaatctatttttttgaacaacggacctagtggtatatcttgttctatgtatctaaaataatgtctgactagatccgttagtttaatatcctcagtcatcttgtctagaatggcaaatctaactgcgggtttaggctttagtttagtttttatatctacatctatgtctttatctaacaccaaaaatataatagctaatattttattacaatcatccggatattcttctacgatctcactaactaatgtttctttggttatactagtatagtcactatcggacaaataaagaaaatcagatgatcgatgaataatacatttaaattcatcatctgtaagatttttgagatgtctcattaaaatattattagggtcagtactcattatcattcggcagctattacttattttatttttctgtattttattatttttcaccatatagatcaatcattagatcatcaaaatatgtttcaatcatcctaaagagtatggtgaatgactcttcccatctaatttctgaacgttcaccaatgtctctagccactttggcactaatagcgatcattcgcttagcgtcttctatattattaactggttgattcaatctatctagcaatggaccgtcggacagcgtcattctcatgttcttaatcaatgtacatacatcgccgtcatctaccaattcatccaacaacataagctttttaaaatcatcattataataggtttgatcgttgtcatttctccaaagaatatatctaataagtagagtcctcatgcttagtaatttaactattttagttaacaactattttttatgttaaatcaattagtacaccgctatgtttaatacttattcatattttagtttttaggattgagaatcaatacaaaaaattaatgcatcattaattttagaaatacttagtttccacgtagttaatgaaacatttgaactcatcgtacaggacgttctcgtacaggacgtaactataaaccggtttatatttgttcaagatagatacaaatccgataactttttttacgaattctacgggatccactttaaaagtgtcataccgggttctttttattcttttaaacagatcaatggtgtgatgttgattaggtcttttacgaatttgatatagaatagcgttcacatatcctccataatggtcaatcgccatttgttcgtatgtcataaattctttaattatatgacactgtgtattatttagttcatccttgttcatcattaggaatctatccaaaatggcaattatactagaactataggtgcgttgtatacacatattgatgtgtctgtttatacaatccatgatatttggatccatgctactaccttcgggtaaaattgtagcatcatataccatttctagtactttaggttcattattatccattgcagaggacgtcatgatcgaatcctaaaaaaatatattatttttatgttattttgttaaaaataatcatcgaatacttcgtaagatactccttcatgaacataatcagttacaaaacgtttatatgaagtaaagtatctacgatttttacaaaagtccggatgcataagtacaaagtacgcgataaacggaataataatagatttatctagtctatctttttctatagctttcatagttagatacatggtctcagaagtaggattatgtaacatcagcttcgataaaatgactgggttatttagtcttacacattcgctcatacatgtatgaccgttaactacaaagtctacactaaaatgattgaacaatagatagtctaccattgtttcgtattcagatagtacagcgtagtacatagcatcttcacaaattatatcattgtctaatagatatttgacgcatcttatggatcccacttcaacagccatcttaaaatcggtagaatcatattgctttcctttatcattaataatttctaaaacatcatctctatcataaaagatacaaatattaactgtttgatccgtaataacattgctagtcgatagcaatttgttaataagatgcgctgggctcaatgtcttaataagaagtgtaagaggactatctccgaatttgttttgtttattaacatccgttgatggaagtaaaagatctataatgtctacattcttgactgttttagagcatacaatatggagaggtgtatttccatcatgatctggttttgagggactaattcctagtttcatcatccatgagattgtagaagcttttggattgtctgacataagatgtctatgaatatgatttttgccaaatttatccactatcctggcttcgaatccgatggacattatttttttaaacactctttctgaaggatctgtacacgccaacaacggaccacatccttcttcatcaaccgagttgttaatcttggctccatactgtaccaataaatttattctctctatgacttcatcatctgttcccgagagataatatagaggtgttttattatgtttatcacacgcgtttggatctgcgccgtgcgtcagcagcatcgcgactattctattattattaattttagaagctatatgcaatggataatttccatcatcatccgtctcatttggagagtatcctctatgaagaagttcttcgacaaatcgttcatctagtcctttaattccacaatacgcatgtagaatgtgataattatttccagaaggttcgatagcttgtagcatattcctaaatacatctaaatttttactattatatttggcataaagagatagataatactcggccgacataatgttgtccattgtagtataaaaattaatatttctatttctatttctgtatatttgcaacaatttactctctataacaaatatcataacttagttcttttatgtcaagaaggcactggtttagttcatctataaatgtcacgccataactaccacgcatgctatactcagaattatgataaagatatttatccttggggtgtaggtaatggggattaatctttgttggatcagtctctaagttaacacatgtcacacatgatccatttatagttatatcacacgatgatgatttatgaattgattccggaagatcgctatcgtattttgtggttccacaattcatttccatacatgttattgtcacactaatattatgatgaactttatctagccgctgagtggtaaacaacagaacagatagtttattatctttaccaacaccctcagccgctgccacaaatctctgatccgtatccatgatggtcatgtttatttctagtccgtatccagtcaacactatgttagcatttctgtcgatatagctttcactcatatgacactcaccaataatagtagaattaatgtcgtaatttacaccaatagtgagttcggcggcaaagtaccaataccggtaatcttgtcgaggaggacatatagtattcttgtattctaccgaatacccgagagatgcgatacaaaagagtaagactaatttgtaaaccatcttactcaaaatatgtaacaatagtacgatgcaatgagtaagacaataggaaatctatcttatatacacataattattctatcaattttaccaattagttagtgtaatgttaacaaaaatgtgggagaatctaattagtttttctttacacaattgacgtacatgagtctgagttccttgtttttgctaattatttcatccaatttattattcttgactatatcgagatcttttgtataggagtcagacttgtattcaacatgcttttctataatcattttagctatttcggcatcatccaatagtacattttccagattagcagaatagatattaatgtcgtatttgaacagagcctgtaacatctcaatgtctttattatctatagccaatttaatgtccggaatgaagagaagggaattattggtgtttgtcgacgtcatatagtcgagcaagagaatcatcatatccacgtgtccattttttatagtgatgtgaatacaactaaggagaatagccagatcaaaagtagatggtatctctgaaagaaagtaggaaacaatacttacatcattaagcatgacggcatgataaaatgaagttttccatccagttttcccatagaacatcagtctccaatttttcttaacaaacagttttaccgtttgcatgttaccactatcaaccgcataatacaatgcggtgtttcccttgtcatcaaattgtgaatcatccagtccactgaatagcaaaatctttactattttggtatcttccaatgtggctgcctgatgtaatggaaattcattctctagaagatttttcaatgctccagcgttcaacaacgtacatactagacgcacgttattatcagctattgcataatacaaggcactatgtccatggacatccgccttaaatgcatctttgctagagagaaagcttttcagctgcttagacttccaagtattaattcgtgacagatccatgtctgaaacgagacgctaattagtgtatattttttcattttttataattttgtcatattgcaccagaattaataatatctctaatagatctgattagtagatacatggctatcgcaaaacaacatatacacatttaataaaaataatatttattaagaaaattcagatttcacgtacccatcaatataaataaaataatgattccttacaccgtacccatattaaggagattccaccttacccataaacaatataaatccagtaatatcatgtctgatgatgaacacaaatggtgtattaaattccagtttttcaggagatgatctcgccgtagctaccataatagtagatgcctctgctacagttccttgttcgtcgacatctatctttgcattctgaaacattttataaatatataatgggtccctagtcatatgtttaaacgacgcattatctggattaaacatactaggagccatcatttcggctatcgacttaatatccctcttattttcgatagaaaatttagggagtttaagattgtacactttattccctaattgaaacgaccaatagtctaattttgcagccgtaatagaatctgtgaaatgggtcatattatcacctattgccaggtacatactaatattagcatccttatacggaaggcgtaccatatcatattcttcgtcatcgattgtgattgtatttccttgcaatttagtaactacgttcatcatgggaaccgttttcgtaccgtacttattagtaaaactagcattgcgtgttttagtgatatcaaacggatattgccatatacctttaaaatatatagtattaatgattgcccatagagtattattgtcgagcatattagaatctactacattagacataccggatctacgttctactatagaattaattttattaaccgcatctcgtctaaagtttaatctatataggccgaatctatgatattgttgataatacgacggtttaatgcacacagtattatctacgaaactttgataagttagatcagtgtacgtatatttagatgttttcagcttagctaatcctgatattaattctgtaaatgctggacccagatctctttttctcaaatccatagtcttcaataattctattctagtattacctgatgcaggcaatagcgacataaacatagaaaacgaataaccaaacggtgagaagacaatattatcatcttgaatatttttatacgctactataccggcattggtaaatccttgcagacgataggtagacactgaacacgttaacgatagtatcaataacgcaatcatgattttatggtattaataattaaccttatttttatgttcggtataaaaattattgatgtctacacatccttttgtaattgacatctatatatccttttgtataatcaactctaatcactttaacttttacagttttccctaccagtttatccctatattcaacatatctatccatatgcatcttaacactctctgccaagatagcttcaaagtgaggatagtcaaaaagataaatatatagagcataatccttctcgtatactctgccctttattacatcacccgcattgggcaacgaataacaaaatgcaagcatcttgttaacgggctcgtaaattgggataaaaattatgtttttatatctattttattcaagagaatattcaggaatttctttttccggttgtatctcatcgcagtatatatcatttgtacattgtttcatattttttaatagtctacaccttttagtaggactagtatcgtacaattcatagctgtattttgaattccaatcacgcataaaaatatcttccaattgttgacgaagacctaatccatcatccggtgtaatattaatagatgctccacatgtatccgtaaagtaatttcctgtccaatttgaggtacctatatacgccgttttatcggttaccatatatttggcatggtttaccctagaatacggaatgggaggatcagcatctggtacaataaatagctttacttctatatttatgtttttagattttagcatagcgatagatcttaaaaagtttctcatgataaacgaagatcgttgccagcaactaatcaatagcttaactgacacttgtctgtctatagcggctcttcttaattcatcttctatataaggccaaaacaaaatattgcctgccttcgaataaataatagggataaagttcataacagatacataaacgaatttactcgcatttctgatacatgacaataaagcggttaaatcattggttctttccatagtacatagttgttgcggtgcagaagcaataaatacagagtgtggaacgccgcttacgttaatactaagaggatgatctgtattataatacgacggataaaagtttttccaattatatggtagattgttaactccaagataccagtatacctcaaaaatttgagtgagatccgctgccaagttcctattattgaagatcgcaatacccaattctttgacctgagttagtgatctccaatccatgttagcgcttcctaaataaatatgtgtattatcagatatccaaaattttgtatgaagaactcctcctaggatatttgtaatatctatgtatcgtacttcaactccggccatttgtagtctttcaacatcctttaatggtttgttagatttattgacggctactctaactcgtactcctcttttgggtaattgtacaatcttgtttaatattatcgtgccgaaattcgtacccacttcatccgataaactccaataaaaagatgatatatctagtgtttttgtggtattggatagaatttccctccacatgttaaatgtagacaaatatactttatcaaattgcatacctataggaatagtctctgtaatcactgcgattgtattatccggattcattttatttgttaaaagaataatcctatatcacttcactctattaaaaatccaagtttctatttctttcatgactgattttttaacttcatccgtttccttatgaagatgatgtttggcaccttcataaatttttatttctctattacaatttgcatgttgcatgaaataatatgcacctaaaacatcgctaatcttattgtttgttccctggagtatgagagtcggggggtgttaatcttggaaattatttttctaaccttgttggtagccttcaagacctgactagcaaatccagccttaattttttcatgattgattaatgggtcgtattggtatttataaactttatccatatctctagatactgattctggacatagctttccgactggcgcatttagtgtgatggttcccataagtttggcagctagcagattcagttttgaaacagcatctgcattaactagaggagacattagaatcattgctgtaaacaagtttggattatcgtaagaggctagctcccatggaatgacccaataagtagatttaatagttaccacgtgctgtaccaaagtcatcaatcatcattttttcaccattacttcttccatgtccaatatgatcatgtgagaatactaaaattcctaacgatgatatgttttcagctagttcgtcataacgtccagaatgtttaccagctccatgacttatgaatactaatgccttaggatatgtaataggtttccaatatatgtaatcattgtccagattgaacatacagtttgcactcatgattcacgttatataactatcaatattaacagttcgtttgatgatcatattatttttatgttttattgataattgtaaaaacatacaattaaatcaatatagaggaaggagacggctactgtcttttgtgagatagtcatggcgactaaattagattatgaggatgctgttttttactttgtggatgatgataaaatatgtagtcgcgactccatcatcgatctaatagatgaatatattacgtggagaaatcatgttatagtgtttaacaaagatattaccagttgtggaagactgtacaaggaattgatgaagttcgatgatgtcgctatacggtactatggtattgataaaattaatgagattgtcgaagctatgagcgaaggagaccactacatcaattttacaaaagtccatgatcaggaaagtttattcgctaccataggaatatgtgctaaaatcactgaacattggggatacaaaaagatttcagaatctagattccaatcattgggaaacattacagatctgatgaccgacgataatataaacatcttgatactttttctagaaaaaaaattgaattgatgatataggggtcttcataacgcataattattacgttagcattctatatccgtgttaaaaaaaattatcctatcatgtatttgagagttttatatgtagcaaacatgatagctgtgatgccaataagctttagatattcacgcgtgctagtgttagggatggtattatctggtggtgaaatgtccgttatataatctacaaaataatcatcgcatatagtatgcgatagtagagtaaacatttttatcgtttctactgggttcatacatcgtctacccaattcggttataaatgaaattgtcgccaatcttacacccaaccccttgttatccattagtatagtattaacttcgttatttatgtcataaactgtaaatgattttgtagatgccatatcatacatgatattcatgtccctattataatcattactaactttatcacaatatatgttgataatatctatatatgatctagtctttgtgggcaactgtctatacaagtcgtctaaacgttgtttactcatatagtatcgaacagccatcattacatggtcccgttccgttgatagataatcgagtatgttagtggacttgtcaaatctatataccatattttctggaagtggatatacatagtcgtgatcaacattattgctagcctcatcttctatatcctgtactataccattatctatatcatctacataatctacgatattattacacataaacatcgacaacatactattgtttattatctaagtcctgttgatccaaacccttgatctcctctatttgtactatctagagattgtacttcttccagttctggataatatatacgttgatagattagctgagctattctatctccagtatttacattaaacgtacattttccattattaataagaatgactcctatgtttcccctataatcttcgtctattacaccgcctcctatatcaatgccttttagggacagaccagacctaggagctattctaccatagcagaacttaggcatggacatactaatatctgtcttaattaactgtcgttctcctggagggatagtataatcgtaagcgctatataaatcatatccggcggcgtaaggtgattgcctagtaggagatttagctctgttagtttccttaacaaatctaactggtgagttaatattcatgttgaacataaaactaatattttatttcaaaattatttaccatcccatatattccatgaataagtgtgatgattgtacacttctatagtatctatatacgattcacgataaaatcctcctatcaatagcagtttattatccactatgatcaattctggattatccctcggataaataggatcatctatcagagtccatgtattgctggattcacaataaaattccgcatttctaccaaccaagaataaccttctaccgaacactaacgcgcatgatttataatgaggataataagtggatggtccaaactgccactgatcatgattgggtagcaaatattctgtagttgtatcagtttcagaatgtcctcccattacgtatataacattgtttatggatgccactgctggattacatctaggtttcagaagactcggcatattaacccaagcagcatccccgtggaaccaacgctcaacagatgtgggatttggtagacctcctactacgtataatttattgttagcgggtatcccgctagcatacagtctggggctattcatcggaggaattggaatccaattgtttgatatataatttaccgctatagcattgttatgtatttcattgttcatccatccaccgatgagatatactacttctccaacatgagtacttgtacacatatggaatatatctataatttgatccatgttcataggatactctatgaatggatacttgtatgatttgcgtggttgtttatcacaatgaaatattttggtacagtctagtatccattttacattatttatacctctgggagaaagataatttgacctgattacatttttgataaggagtagcagatttcctaatttatttcttcgctttatataccacttaatgacaaaatcaactacataatcctcatctggaacatttagttcatcgctttctagaataagtttcatagatagataatcaaaattgtctatgatgtcatcttccagttccaaaaagtgtttggcaataaagtttttagtatgacataagagattggatagtccgtattctatacccatcatgtaacactcgacacaatattcctttctaaaatctcgtaagataaagtttatacaagtgtagatgataaattctacagaggttaatatagaagcacgtaataaattgacgacgttatgactatctatatatacctttccagtatacgagtaaataactatagaagttaaactgtgaatgtcaaggtctagacaaacccttgtaactggatctttatttttcgtgtatttttgacgtaaatgtgtgcgaaagtaaggagataactttttcaatatcgtagaattgactattatattgccacctatagcatcaataattgttttgaatttcttagtcatagacaatgctaatatattcttacagtacacagtattaacaaatatcggcatttatgtttctttaaaagtcaacatctaaagaaaaatgattatcttcttgagacataactcccattttttggtattcacccacacgtttttcgaaaaaattagtttttccttccaatgatatattttccatgaaatcaaacggattggtaacattataaatttttttaaatcccaattcagaaatcaatctatccgcgacgaattctatatatgttttcatcatttcacaattcattcctataagtttaactggaagagccgcagtaagaaattcttgttcaatggataccgcatctgttataatagatctaacggtttcttcactcggtggatgcaataaatgtttaaacatcaaacatgcgaaatcgcagtgcagaccctcgtctctactaattagttcgttggaaaacgtgagtccgggcattaggccacgctttttaagccaaaatatggaagcgaatgatccagaaaagaagattccttctactgcagcaaaggcaataagtctctctccataaccggcgctgtcatgtatccacttttgagcccaatcggccttcttttttacacaaggcatcgtttctatggcattaaagagatagtttttttcattactatctttaacataagtatcgatcaaaagactatacatttccgaatgaatgttttcaatggccatctgaaatccgtagaaacatctagcctcggtaatctgtacttctgtacaaaatcgttccgccaaattttcattcactattccgtcactggctgcaaaaaacgccaatacatgttttataaaatatttttcgtctggtgttagtttattccaatcattgatatctttagatatatctacttcttccactgtccaaaatgatgcctctgcctttttatacatgttccagatgtcataatattggattgggaaaataacaaatctatttggatttggtgcaaggatgggttccataactaaattaacaataacaataaattttttttcagttatctatatgcctgtacttggatcttttgtacatcgatatcgccgcaatcactacaataattacaagtattattgatagcattgttattagtactatcataattaaattatcgacattcatgggtgctgaataatcgttattatcatcattatcattttgtaattgtgacatcatactagataaatcgtttgcgagattgttgtgggaagcgggcatggaggatgaattatcgttattattatttaacgcctcccattcggattcacaaatgttacgcacattcaacattttatggaaactataattttgtgaaaacagataacaagaaaactcgtcatcgttcaaatttttaacgatagtaaaccgattaaacgtcgagctaatttctaacgctagcgactctgttggatatgggtttccagatatatatcttttcagttcccctacgtatctataatcatctgtaggaaatggaagatatttccatttatctactgttcctaatatcatatgtggtggtgtagtagaaccattaagcgcgaaagatgttatttcgcatcgtattttaacttcgcaataatttctggttagataacgcactctaccagtcaagtcaatgatattagcctttacagatatattcatagtagttgtaacgatgactccatcttttagatgcgatactcctttgtatgtaccagaatcttcgtaccgcaaactcgatatatttaaacaagttaatgagatattaacgcgttttatgaatgatgatatataaccagaagttttatcctcggtggctagcgctataaccttatcattataataccaactagtgtgattaatatgtgacacgttagtgtgggtacaaatatgtacattatcgtctacgtcgtattcgatacatccgcatacagccaacaaatataaaatgacaaatactctaacgccgttcgtacccatcttgatgcggtttaataaatgttttgatttcaatttattgtaaaaaaagattcggttttatactgttcgatattctcattgcttatattttcatctatcatctccacacagtcaaatccgtggttagcatgcacctcatcaaccggtaaaagactatcggactcttctatcattataactctagaatatttaatttggtcattattaatcaagtcaattatcttatttttaacaaacgtgagtattttactcattttttataaaaacttttagaaatatacagactctatcgtgtgtctatatcttctttttatatccaatgtatttatgtctgatttttcttcatttatcatatataatggtccaaattctacacgtgcttcggattcatccagatcattaaggttcttataattgtaacatccttctcttccctcttctacatcttccttcttattcttattcttagcgtcacagaatctaccacagcaggatcccatgacgagcgtcatattaaactaatccattttcaattataatatacgattagtaatgaccattaaaataaaaaatattcttcataaccggcaagaaagtgaaaagttcacattgaaactatgtcagtagtatacatcatgaaatgatgatatatatatactctattttggtggaggattatatgatataattcgtggataatcattcttaagacacatttcttcattcgtaaatcttttcacgttaaatgagtgtccatattttgcaatttcttcatatgatggcggtgtacgtggacgaagctgctcctgttcttgttgtagtcgccgactgtcgtgtttgcgtttagatccctccattatcgcgattgcgtagatggagtactattatataccttgtaattaaatttttttattaattaaacgtataaaaacgttccgtatctgtatttaagagccagatttcgtctaatagaacaaatagctacagtaaaaataactagaataattgctacacccactagaaaccacggatcgtaatacggcaatcggttttcgataataggtggaacgtatattttatttaaggacttaacaattgtctgtaaaccacaatttgcttccgcggatcctgtattaactatctgtaaaagcatatgttgaccgggcggagccgaacattctccgatatctaatttctgtatatctataatattattaacctccgcatacgcattacagttcttttctagcttggataccgcactaggtacatcgtctagatctattcctatttcttcagcgatagctcttctatccttttccggaagcaatgaaatcacttcaataaatgattcaaccatgagtgtgaaactaagtcgagaattactcatgcatttgttagttattcggagcgcgcaatttttaaactgtcctataacctctcctatatgaatagcacaagtgacattagtagggatagaatgttgagctaatttttgtaaataactatctataaaaagattatacaaagttttaaactctttagtttccgccatttatccagtctgagaaaatgtctctcataataaatttttccaagaaactaattgggtgaagaatggaaacctttaatctatatttatcacagtctgttttggtacacatgatgaattcttctaatgctgtactaaattcgatatctttttcgatttctggatatgtttttaataaagtatgaacaaagaaatggaaatcgtaataccagttatgttcaactttgaaattgttttttattttcttgttaatgattccagccacttgggaaaagtcaaagtcgtttaatgccgatttaatacgttcattaaaaacaaactttttatcctttagatgaattattattggttcattggaatcaaaaagtaagatattatcgggtttaagatctgcgtgtaaaaagttgtcgcaacagggtagttcgtagattttaatgtataacagagccatctgtaaaaagataaactttatgtattgtaccaaagatttaaatcctaatttgatagctaactcggtatctactttatctgccgaatacagtgctaggggaaaaattataatatttcctctttcgtattcgtagttagttctcttttcatgttcgaaaaagtgaaacatgcggttaaaatagtttataacattaatattactgttaataactgccggataaaagtgggatagtaatttcacgaatttgatactgtcctttctctcgttaaacgcctttaaaaaaactttagaagaatatctcaatgagagttcctgaccatccatagtttgtatcaataatagcaacatatgaagaacccgtttatacagagtatgtaaaaatgttaatttatagtttaatcccatggcccacgcacacacgattaattttttttcatctccctttagattgttgtatagaaatttgggtactgtgaactccgccgtagtttccatgggactatataattttgtggcctcgaatacaaattttactacatagttatctatcttaaagactataccatatcctcctgtagatatgtgataaaaatcgtcgtttataggataaaatcgtttatccttttgttggaaaaaggatgaattaatgtaatcattctcttctatctttagtagtgtttccttattaaaattcttaaaataatttaacaatctaactgacggagcccaattttggtgtaaatctaattgggacattatgttgttaaaatacaaacagtctcctaatataacagtatctgataatctatggggagacatccattgatattcaggggatgaatcattggcaacacccatttattgtacaaaaagccccaatttacaaacgaaagtccaggtttgatagagacaaacaattaactattttgtctctgtttttaatttctttggtaatgaaattattcacaatatcagtatcttctttatctaccagagattttactaacttgataaccttggctgtctcattcaatagggtagtaatatttgtatgtgtgatattgatatctttttgaattgtttcttttagaagtgattctttgatggtgccagcatacgaattacaataatgcagaaactcagttaacatgcaggaattatagtaagccaattccaattgttgcctgtattgtattagagtattaatatgcgcaatggtgtccttgcgtttctctgatagaatgcgagcagcgattttggcgttatcatttgacgatatttctggaatgacgaatcctgtttctactaactttttggtaggacaaagtgaaacaatcaagaagatagcttctcctcctatttgtggaagaaattgaactcctctagatgatctactgacgatagtatctccttgacagatattggaccgaattacagaagtacctggaatgtaaagccctgaaaccccctcattttttaagcagattgttgccgtaaatcctgcactgtgaccaagatagagagctcctttggtgaatccatctctatgtttcagtttaaccaagaaacagtcagctggtctaaaatttccatctctatctaatacagcatctaacttgatgtcaggaactatgaccggtttaatgttatatgtaacattgagtaaatccttaagttcataatcatcactgtcatcagttatgtacgatccaaacaatgtttctactggcatagtggatacgaagatgctatccatcagaatgtttccctgattagtattttctatatagctattcttctttaaacgattttccaaatcagtaactatgttcatttttttaggagtaggacgcctagccagtatggaagaggattttctagatcctctcttcaacatctttgatctcgatggaatgcaaaaccccatagtgaaacaaccaacgataaaaataatattgtttttcactttttataattttaccatctgactcatggattcattaatatctttataagagctactaacgtataattctttataactgaactgagatatatacaccggatctatggtttccataattgagtaaatgaatgctcggcaataactaatggcaaatgtatagaacaacgaaattatactagagttgttaaagttaatattttctatgagctgttccaataaattatttgttgtaactgcgttcaagtcataaatcatcttgatactatccagtaaaccgtgtttaagttctggaatattatcatcccattgtaaagcccctaattcgactatcgaatatcctgctctgatagcagtttcaatatcgacggacgtcaatactgtaataaaggtggtagtattgtcatcatcgtgataaactacgggaatatggtcgttagtaggtacggtgactttacacaacgcgatatataactttccttttgtaccatttttaacgtagttgggacgtcctgcagggtattgttttgaagaaatgatatcgagaacagatttgatacgatatttgttggattcctgattattcactataatataatctagacagatagatgattcgataaatagagaaggtatatcgttggtaggataatacatccccattccagtattctcggatactctattgatgacactagttaagaacatgtcttctattctagaaaacgaaaacatcctacatggactcattaaaacttctaacgctcctgattgtgtctcgaatgcctcgtacaaggatttcaaggatgccatagattctttgaccaacgatttagaattgcgtttagcatctgatttttttattaaatcgaatggtcggctctctggtttgctaccccaatgataacaatagtcttgtaaagataaaccgcaagaaaatttatacgcatccatccaaataaccctagcaccatcggatgatattaatgtattattatagattttccatccacaattattgggccagtatactgttagcaacggtatatcgaatagattactcatgtaacctactagaatgatagttcgtgtactagtcataatatctttaatccaatctaagaaatttaaaattagattttttacactgttaaagttaacaaaggtattacccggatacgtggatatcatatatggcattggtccattatcagtaatagctccataaactgatacggcgatggtttttatatgtgtttgatctaacgaggaagaaattcgcgcccacaattcatctctagatatgtatttaatatcaaacggtaacacatcaatttcgggacgcgtatatgtttctaaatttttaatccaaatataatgatgacctatatgccctattatcatactgtcaactatagtacacctagagaacttacgatacatctgtttcctataatcgttaaattttacaaatctataacatgctaaaccttttgacgacagccattcattaatttctgatatggaatctgtattctcgataccgtattgttctaaagccagtgctatatctccctgttcgtgggaacgctttcgtataatatcgatcaacggataatctgaagtttttggagaataatatgactcatgatctatttcgtccataaacaatctagacataggaattggaggcgatgatcttaattttgtgcaatgagtcgtcaatcctataacttctaatcttgtaatattcatcatcgacataatactatctatgttatcatcgtatattagtataccacggccttcttcatttcgtgccaaaataatatacagtcttaaataattacgcaatatctcaatagtttcataattgttagctgttttcatcaagatttgtaccctgtttaacatgatggcgttctatacgtctctattttcttttttttaaatttttaacgatttactgtggctagatacccaatctctctcaaatatttttttagcctcgcttacaagctgtttatctatactattaaaactgacgaatccgtgattttggtaatgggttccgtcgaaatttgccgaagtgatatgaacatattcgtcgtcgactatcaacaattttgtattattctgaatagtgaaaaccttcacagatagatcattttgaacacacaacgcgtctagacttctggcggttgccatagaatatacgtcgttcttatcccaattaccaactagaagtctgatcttaactcctctattaatggctgcttctataatggagttgtaaatgtcgggccaatagtagctattaccgtcgacacgtgtagtgggaactatggccaaatgttcaatatctatactagtcttagccgacttgagtttatcaataactacatcggtatctagatctctagaatatcccaataggtgttccggagaatcagtaaagaacactccacctataggattcttaatatgatacgcagtgctaactggcaaacaacaagccgcagagcataaattcaaccatgaattttttgcgctattaaaggctttaaaagtatcaaatcttctacgaagatctgtggccagcgggggataatcagaatatacacctaacgttttaatcgtatgtatagatcctccagtaaatgacgcgtttcctacataacatctttcatcatctgacacccaaaaacaaccgagtagtagtcccacattattttttttatctatattaacggttataaaatttatatccgggcagtgactttgtagctctcccagatttcttttccctcgttcatctagcaaaactattattttaatccctttttcagatgcctcttttagtttatcaaaaataagcgctcccctagtcgtactcagaggattacaacaaaaagatgctatgtatatatatttcttagctagagtgataatttcgttaaaacattcaaatgttgttaaatgatcggatctaaaatccatattttctggtagtgtttctaccagcctacattttgctcccgcaggtaccgatgcaaatggccacatttagttaacataaaaacttatacatcctgttctatcaacgattctagaatatcatcggctatatcgctaaaattttcatcaaagtcgacatcacaacctaactcagtcaatatattaagaagttccatgatgtcatcttcgtctatttctatatccgtatccattgtagattgttgaccgattatcgagtttaaatcattactaatactcaatccttcagaatacaatctgtgtttcattgtaaatttataggcggtgtatttaagttggtagattttcaattatgtatcaatatagcaacagtagttcttgctcctccttgattctagcatcctcttcattattttcttctacgtacataagcatgtccaatacgttagacaacacaccgacgatggcggccgccacagacacgaatatgactagaccgatgaccatttaaaaacccctctctagctttcacttaaactgtatcgattattcttttagaacatgtataatataaaaacattattctatttcgaatttaggcttccaaaaatttttcatccgtaaaccgataataatatatatagacttgttaatagtcggaataaatagattaatgcttaaactatcatcatctccacgattagagatacaatatttacattttttttgctgtttcgaaactttatcaatacacgttaatacaaacccaggaaggagatattgaaactgaggctgttgaaaatgaaacggtgaatacaataattcagataatgtaaaatcatgattccgtattctgatgatattagaactgctaatggatgtcgatggtatgtatctaggagtatctattttaacaaagcatcgatttgctaatatacaattatccttttgattaattgttattttattcatattcttaaaaggtttcatatttatcaattcttctacattaaaaatttccatttttaatttatgtagcccccgcaatactcctcattacgtttcattttttgtctataatatccattttgttcatctcggtacatagattatccaattgagaagcgcatttagtagttttgtacattttaagtttattgacgaatcgtcgaaaactagttatagttaacattttattatttgataccctgatattaatacccctgccgttactattatttataactgatgtaatccacgtaacattagaattaattatcgatagtaatgcatcgacgcttccaaaattgtctattataaactcaccgataatttttttattgcatgttttcatattcattaggattatcaaatctttaatcttactacgattgtatgcgttgatattgcaagacgtcattctaaaagacggaggatctccatcaaatgccagacaatcacgtacaaagtacatggaaataggttttgttctattgcgcatcatagatttatatagaacacccgtagaaatactaatttgttttactctataaaatactaatgcatctatttcatcgttttgtataacgtctttccaagtgtcaaattccaaatttttttcattgatagtaccaaattcttctatctctttaactacttgcatagataggtaattacagtgatgcctacatgccgttttttgaaactgaatagatgcgtctagaagcgatgctacgctagtcacaatcaccactttcatatttagaatatatgtatgtaaaaatatagtagaatttcattttgtttttttctatgctataaatgaattctcattttgcatctgctcatactccgttttatatcaataccaaagaaggaagatatctggttctaaaagccgttaaagtatgcgatgttagaactgtagaatgcgaaggaagtaaagcttcctgcgtactcaaagtagataaaccctcatcgcccgcgtgtgagagaagaccttcgtccccgtccagatgcgagagaatgaataaccctggaaaacaagttccgtttatgaggacggacatgctacaaaatatgttcgcggctaatcgcgacaacgtggcgtcgagacttttgaactaaaatacaattatatccttttcgatattaataaatccgtgtcgtccaggttttttatctctttcagtatgtgaatagataggtattttatctctattcatcatcgaatttaagagatccgataaacattgtttgtattctccagatgtcagcatctgatacaacaatatatgtgcacataaacctctggcacttatttcatgtaccttccccttatcactaaggagaatagtatttgagaaatatgtatacatgatattatcatgaattagatatacagaatttgtaacactctcgaaatcacacgatgtgtcggcgttaagatctaatatatcactcgataacacattttcatctagatacactagacattttttaaagctaaaatagtctttagtagtgacagtaactatgcgattattttcatcgatgatacatttcatcggcatattattacgcttaccatcaaagactataccatgtgtatatctaacgtattctagcatggttgccatacgcgcattaaacttttcaggatctttggatagatcttccaatctatctatttgagaaaacatttttatcatgttcaatagttgaaacgtcggatccactatatagatattatctataaagattttaggaactacgttcatggtatcctggcgaatattaaaactatcaatgatatgattatcgttttcatcttttatcaccatatagtttctaagatatgggattttacttaatataatattatttcccgtgataaattttattagaaaggccaaatctataagaaaagttctagaattagtctgaagaatatctatatcgccgtaccgtatatttggattaattagatatagagaatatgatccgtaacatatacaacttttattatggcgtctaagatattcttccatcaacttattaacatttttgactagggaagatacattatgacgtcccattacttttgccttgtctattactgcgacgttcatagaatttagcatatctcttgccaattcttccattgatgttacattataagaaattttagatgaaattacatttggagctttaatagtaagaactcctaatatgtccgtgtatgtggtcactaatacagattgtagttctataatcgtaaataatttacctatattatatgtttgagtctgtttagaaaagtagctaagtatacgatcttttatttctgatgcagatgtattaacatcggaaaaaaatctttttttattcttttttactaaagatacaaatatgtctttgttaaaaacagttattttttgaatatttctagcttgtaattttaacatatgatattcgttcacactaggtactctgcctaaataggtttctataatctttaatgtaatattaggaagagtattctgatcaggattcctattcattttgaggatttaaaactctgattattgtctaatatggtctctacgcaaactttttcacagagcgatagagtttttgataactcgtttttcttaagaaatataaaactactgtctccagagctcgctctatcttttattttatttaattcgatacaaactcctgatactggttcagaaagtaattcattaattttcagtcctttatagaagatatttaatatagataatacaaaattttcagttcttgatatcgatctgattgatcctagaactagatatattaataacgtgctcattaggcagtttatggcagcttgataattagatatagtatattccagttcatatttattagataccgcattgcccagattttgatattctatgaattcctctgaaaataaatccaaaataactaaacattctattttttgtggattagtgtactctcttccctctatcatgttcactactggtgtccacgatgataaatatctagagggaatataatatagtccataggatgccaatctagcaatgtcgaataactgtaatttgattcttcgttcttcattatgaattgattcttgaggtataaacctaacacaaattatattattagacttttcgtatgtaatgtctttcatgttataagtttttaatcctggaatagaatctattttaatgaggcttttaaacgcagagttctccaacgagtcaaagcataatactctgttgtttttcttatatacgatgttacgattttcttctttgaatggaataggtttttgaattagtttataattacaacataatagataaggaagtgtgcaaatagtacgcggaaaaaacataatagctcccctgttttcatccatggttttaagtaaatgatcactggcttctttagtcaatggatattcgaacattaaccgtttcatcatcattggacagaatccatatttcttaatgtaaagagtgatcaaatcattgtgtttattgtaccatcttgttgtaaatgtgtattcggttatcggatctgctcctttttctattaaagtatcgatgtcgatctcgtctaagaattcaactatatcgacatatttcatttgtatacacataaccattactaacgtagaatgtataggaagagatgtaacgggaacagggtttgttgattcgcaaactattctaatacataattcttctgttaatacgtcttgcacgtaatctattatagatgccaagatatctatataattattttgtaagatgatgttaactatgtgatctatataagtagtgtaataattcatgtatttcgatatatgttccaactctgtctttgtgatgtctagtttcgtaatatctatagcatcctcaaaaaatatattcgcatatattcccaagtcttcagttctatcttctaaaaaatcttcaacgtatggaatataataatctattttacctcttctgatatcattaatgatatagtttttgacactatcttctgtcaattgattcttattcactatatctaagaaacggatagcgtccctaggacgaactactgccattaatatctctattatagcttctggacataattcatctattataccagaattaatgggaactattccgtatctatctaacatagttttaagaaagtcagaatctaagacctgatgttcatatattggttcatacatgaaatgatctctattgatgatagtgactatttcattctctgaaaattggtaactcattctatatatgctttccttgttgatgaaggatagaatatactcaatagaatttgtaccaacaaactgttctcttatgaatcgtatatcatcatctgaaataatcatgtaaggcatacatttaacaattagagacttgtctcctgttatcaatatactattcttgtgataatttatgtgtgaggcaaatttgtccacgttctttaattttgttatagtagatatcaaatccaatggagctacagttcttggcttaaacagatatagtttttctggaacgaattctacaacattattataaaggactttgggtagataagtgggatgaaatcctattttaattaatgcgatagccttgtcctcgtgcagatatccaaacgcttttgtgatagtatggcattcattgtctagaaacgctctacgaatatctgtgacagatatcatctttagagaatatactagtcgcgttaatagtactacaatttgtattttttaatctatctcaataaaaaaattaatatgtatgattcaatgtataactaaactactaactgttattgataactagaatcagaatctaatgatgacgtaaccaagaagtttatctactgccaatttagctgcattatttttagcatctcgtttagattttccatctgccttatcgaatactcttccgtcgatgtctacacaggcataaaatgtaggagagttactaggccccactgattcaatacgaaaagaccaatctctcctagtaatttggcagtactcattaataacggtgacagggttagcacctttccaatcaataatttttttagccggaataacatcatcaaaagacttatgatcctctctcattgatttttcgcgggatacatcatctattatgacgtcagccatagcatcagcatccggcttatccgcctccgttgtcataaaccaacgaggaggaatatcgtcggagctgtacaccatagcactacgttgaagatcgtacagagctttattaacttctcgcttctccatattaagttgtctagttagttgtgcagcagtagctccttcgattccaatggttttaatagcctcacacacaatctctgcgttagaacgctcgtcgatatagattttagacatttttagagagaactaacgcaatcagtaataaaactaatttattttatcattttttttattcatcatcctctggtggttcgtcgtttctatcgaatgtagctctgattaacccgtcatctataggtgatgctggttctggagattctggaggagatggattattatctggaagaatctctgttatttccttgttttcatgtatcgattgcgttgtaacattaagattgcgaaatgctctaaatttgggaggcttaaagtgttgtttgcaatctctacacgcgtgtctaactagtggaggttcgtcagcggctctagtttgaatcatcatcggcgtagtattcctacttttacagttaggacacggtgtattgtatttctcgtcgagaacgttaaaataatcgttgtaactcacatcctttattttatctatattgtattctactcctttcttaatgcattttataccgaataagagatagcgaaggaattctttttcggtgccgctagtacccttaatcatatcacatagtgttttatattccaaatttgtggcaatagacggtttatttctatacgatagtttgtttctggaatcctttgagtattctataccaatattattctttgattcgaatttagtttcttcgatattagattttgtattacctatattcttgatgtagtactttgatgatttttccatggcccattctattaagtcttccaagttggcatcatccacatattgtgatagtaattctcggatatcagtagcggttaccgccattgatgtttgttcattggatgagtaactactaatgtatacattttccatttataacacttatgtattaactttgttcatttatattttttcattattatgttgatattaacaaaagtgaatatatatatgttaataattgtattgtggttatacggctacaattttataattagtgaaagtcagtgtccgatgatcaatgacgatagctttactctgaaaagaaagtatcaaatcgatagtgcggagtcaacaataaaaatggataagaagaggacaaagtttcagaatagagccaaaatggtaaaagaaataaatcagacaataagagcagcacaaactcattacgagacattgaaactaggatacataaaatttaagagaatgattaggactactactctagaagatatagcaccatctattccaaataatcagaaaacttataaactattctcggacatttcagccatcggcaaagcatcacggaatccaagtaagatggtatatgctctgctgctttacatgtttcccaatttgtttggagatgatcatagattcattcgttatagaatgcatccaatgagtaaaatcaaacacaagatcttctctcctttcaaacttaatcttattagaatattagtggaagaaagattctataataatgaatgcagatctaataaatggagaataattggaacacaagttgataaaatgttgatagctgaatctgataaatatacaatagatgcaaggtataacctaaaacccatgtatagaatcaagggaaaatctgaagaagataccctctttatcaaacagatggtagaacaatgtgtgacatcccaggaattggtggaaaaagtgttgaagatactgtttagagatttgttcaagagtggagaatacaaagcgtacagatacgatgatgatgtagaaaatggatttattggattggatacactaaaattaaacattgttcatgatatagttgaaccatgtatgcctgttcgtaggccagtggctaagatactgtgtaaagaaatggtaaataaatactttgagaatccgctacatattattggtaaaaatcttcaagagtgcattgactttgttagtgaataggcatttcatctttctccaatactaattcaaattgttaaattaataatggatagtataaatagttattagtgataaaatagtaaaaataattattagaataagagtgtagtatcatagataactctcttctataaaaatggattttattcgtagaaagtatcttatatacacagtagaaaataatatagattttttaaaggatgatacattaagtaaagtaaacaattttaccctcaatcatgtactagctctcaagtatctagttagcaattttcctcaacatgttattactaaggatgtattagctaataccaatttttttgttttcatacatatggtacgatgttgtaaagtgtacgaagcggttttacgacacgcatttgatgcacccacgttgtacgttaaagcattgactaagaattatttatcgtttagtaacacaatacaatcgtacaaggaaaccgtgcataaactaacacaagatgaaaaatttttagaggttgccaaatacatggacgaattaggagaacttataggcgtaaattatgacttagttcttaatccattatttcacggaggggaacccatcaaagatatggaaatcatttttttaaaactgtttaagaaaacagacttcaaagttgttaaaaaattaagtgttataagattacttatttgggcttacctaagcaagaaagatacaggcatagagtttgcggataatgatagacaagatatatatactctatttcaacaaactggtagaatcgtccatagcaatctaacagaaacgtttagagattatatctttcccggagataagactagctattgggtgtggttaaacgaaagtatagctaatgatgcggatattgttcttaatagacacgccattaccatgtatgataaaattcttagttatatatactctgagataaaacaaggacgcgttaataaaaacatgcttaagttagtttatatctttgagcctgaaaaagatatcagagaacttctgctagaaatcatatatgatattcctggagatatcctatctattattgatgcaaaaaacgacgattggaaaaaatattttattagtttttataaagctaattttattaacggtaatacatttattagtgatagaacgtttaacgaggacttattcagagttgttgttcaaatagatcccgaatatttcgataatgaacgaattatgtctttattctctacgagtgctgcggacattaaacgatttgatgagttagatattaataacagttatatatctaatataatttatgaggtgaacgatatcacattagatacaatggatgatatgaagaagtgtcaaatctttaacgaggatacgtcgtattatgttaaggaatacaatacatacctgtttttgcacgagtcggatcccatggtcatagagaacggaatactaaagaaactgtcatctataaaatccaagagtagacggctgaacttgtttagcaaaaacattttaaaatattatttagacggacaattggctcgtctaggtcttgtgttagatgattataaaggagacttgttagttaaaatgataaaccatcttaagtctgtggaggatgtatccgcattcgttcgattttctacagataaaaaccctagtattcttccatcgctaatcaaaactattttagctagttataatatttccatcatcgtcttatttcaaaggtttttaagagataatctatatcatgtagaagaattcttggataaaagcatccatctaaccaagacggataagaaatatatacttcaattgataagacacggtagatcatagaacagaccaaatatattattaataatttgtatatacatagatataattatcacatattaaaaattcacacatttttgataaatgggaactgctgcaacaattcagactcccaccaaattaatgaataaagaaaatgcagaaatgattttggaaaaaattgttgatcatatagttatgtatattagtgacgaatcaagtgattcagaaaataatcctgaatatattgattttcgtaacagatacgaagactatagatctctcattataaaaagtgatcacgagtttgtaaagctatgtaaaaatcatgcagagaaaagttctccagaaacgcaacaaatgattatcaaacacatatacgaacaatatcttattccagtatctgaagtactattaaaacctataatgtccatgggtgacataattacatataacggatgtaaagacaatgaatggatgctagaacaactctctaccctaaactttaacaatctccgcacatggaactcatgtagcataggcaatgtaacgcgtctgttttatacattttttagttatctgatgaaagataaactaaatatataagtataatcccattctaatactttaacctgatgtattagcatcttattagaatattaacctaactaaaagacataacataaaaactcattacatagttgataaaaagcggtaggatataaatattatggctgccaccgttccgcgttttgacgacgtgtacaaaaatgcacaaagaagaattctagatcaagaaacattttttagtagaggtctaagtagaccgttaatgaaaaacacatatctatttgataattacgcgtatggatggataccagaaactgcaatttggagtagtagatacgcaaacttagatgcaagtgactattatcccatttcgttgggattacttaaaaagttcgagtttctcatgtctctatataaaggtcctattccagtatacgaagaaaaagtaaatactgaattcattgctaatggatcgttctctggtagatacgtatcatatcttcgaaagttttctgctcttccaacaaacgagtttattagttttttgttactgacttccattccaatctataatatcttgttctggtttaaaaatactcagtttgatattactaaacacacattattcagatacgtctatacagataatgccaaacacctggcgttggctaggtatatgcatcaaacaggagactataagcctttgtttagtcgtctcaaagagaattatatatttaccggtcccgttccaataggtatcaaagatataaatcaccctaatcttagtagagcaagaagtccatccgattatgagacattagctaatattagtactatattgtactttaccaagtatgatccggtattaatgtttttattgttttacgtacctgggtattcaattactacaaaaattactccagccgtagaatatctaatggataaactgaatctaacaaagagcgacgtacaactgttgtaaattattttatgcttcgtaaaatgtaggttttgaaccaaacattctttcaaagaatgagatgcataaaactttattatccaatagattgactatttcggacgtcaatcgtttaaagtaaacttcgtaaaatattctttgatcactgccgagtttaaaacttctatcgataattgtttcatatgttttaatatttacaagttttttggtccatggtacattagccggacaaatatatgcaaaataatatcgttctccaagttctatagtttctggattatttttattatattcagtaaccaaatacatattagggttatctgcggatttataatttgagtgatgcattcgactcaacataaataattctagaggagacgatctactatcaaattcggatcgtaaatctgtttctaaagaacggagaatatctatacatacctgattagaattcatccgtccttcagacaacatctcagacagtctggtcttgtatgtcttaatcatattcttatgaaacttggaaacatctcttctagtttcactagtacctttattaattctctcaggtacagattttgaattcgacgatgccgagtatttcatcgttgtatatttcttcttcgattgcataatcagattcttatataccgcctcaaactctattttaaaattattaaacaatactctattattaatcagtcgttctaactcctttgctatttctatggacttatctacatcttgactgtctatctctgtaaacacggagtcggtatctccatacacgctacgaaaacgaaatctgtaatctataggcaacgatgttttcacaatcggattaatatctctatcgtccatataaaatggattacttaatggattggcaaaccgtaacataccgttagataactctgctccatttagtaccgattctagatacaagatcattctacgtcctatggatgtgcaactcttagccgaagcgtatgagtatagagcactatttctaaatcccatcagaccatatactgagttggctactatcttgtacgtatattgcatggaatcatagatggccttttcagttgaactggtagcctgttttaacatctttttatatctggctctctctgccaaaaatgttcttaatagtctaggaatggttccttctatcgatctatcgaaaattgctatttcagagatgaggttcggtagtctaggttcacaatgaaccgtaatatatctaggaggtggatatttctgaagcaagagctgattatttatttcttcttccaatctattggtactaacaacgacaccgactaatgtttccggagatagatttccaaagatacacacattaggatacagactgttataatcaaagattaatacattattactaaacattttttgttttggagcaaataccttaccgccttcataaggaaacttttgttttgtttctgatctaactaagatagttttagtttccaacaatagctttaacagtggacccttgatgactgtactcgctctatattcgaataccatggattgaggaagcacatatgttgacgcacccgcgtctgtttttgtttctactccataatactcccacaaatactgacacaaacaagcatcatgaatacagtatctagccatatctaaagctatgtttagattataatccttatacatctgagctaaatcaacgtcatcctttccgaaagataatttatatgtatcattaggtaaagtaggacataatagtacgactttaaatccattttcccaaatatctttacgaattactttacatataatatcctcatcaacagtcacataattacctgtggttaaaacctttgcaaatgcagcggctttgcctttcgcgtccgtagtatcgtcaccgatgaacgtcatttctctaactcctctatttaatactttacccatgcaactgaacgcgttcttggatatagaatccaatttgtacgaatccaatttttcagatttttgaatgaatgaatatagatcgaaaaatatagttccattattgttattaacgtgaaacgtagtattggccatgccgcctactcccttatgactagactgatttctctcataaatacagagatgtacagcttcctttttgtccggagatctaaagataatcttctctcctgttaataactctagacgattagtaatatatctcagatcaaagttatgtccgttaaaggtaacgacatagtcgaacgttagttccaacaattgtttagctattcgtaacaaaactatttcagaacataaaactagttctcgttcgtaatccatttccattagtgactgtatcctcaaacatcctctatcgacggcttcttgtatttcctgttccgttaacatctcttcattaatgagcgtaaacaataatcgtttaccacttaaatcgatataacagtaacttgtatgcgagattgggttaataaatacagaaggaaacttcttatcgaagtgacactctatatctagaaataagtacgatcttgggatatcgaatctaggtatttttttagcgaaacagttacgtggatcgtcacaatgataacatccattgttaatctttgtcaaatattgctcgtccaacgagtaacatccgtctggagatatcccgttagaaatataaaaccaactaatattgagaaattcatccatggtggcattttgtatgctgcgtttctttggctcttctatcaaccacatatctgcgacggagcattttctatctttaatatctagattataacttattgtctcgtcaatgtctatagttctcatctttcccaacggcctcgcattaaatggaggaggagacaatgactgatatatttcgtccgtcactacgtaataaaagtaatgaggaaatcgtataaatacggtctcaccatttcgacatctggatttcagatataaaaatctgttttcaccgtgactttcaaaccaattaatgcaccgaacatccatttatagaatttagaaatatattttcatttaaatgaatcccaaacattggggaagagccgtatggaccattatttttatagtactttcgcaagcgggtttagacggcaacatagaagcgtgtaaacgaaaactatatactatagttagcactcttccatgtcctgcatgtagacggcacgcgactatcgctatagaggacaataatgtcatgtctagcgatgatctgaattatatttattattttttcatcagattatttaacaatttggcatctgatcccaaatacgcgatcgatgtgacaaaggttaaccctttataaacttaacccattataaaacttatgattagtcacgactgaaataaccgcgtgattattttttggtataattctacacggcatggtttctgtgactatgaattcaacccccgttacattagtgaaatctttaacaaacagcaagggttcgtcaaagacataaaactcattgtttacaatcgaaatagaccccctatcacacttaaaataaaaaatatccttatcctttaccaccaaataaaattctgattggtcaatgtgaatgtattcacttaacagttccacaaatttatttattaactccgaggcacatacatcgtcggtattttttatggcaaactttactcttccagcatccgtttctaaaaaaatattaacgagttccatttatatcatccaatattattgaaatgacgttgatggacaaatgatacaaataagaaggtacggtacctttgtccaccatctcctccaattcatgctctattttgtcattaactttaatgtatgaaaacagtacgccacatgcttccatgacagtgtgtaacactttggatacaaaatgtttgacattagtataattgttcaagactgtcaatctataatagatagtagctataatatattctatgatggtattgaagaagatgacaaccttggcatattgatcatttaacacagacatggtatcaacagatagcttgaatgaaagagaatcagtaattggaataagcgtcttctcgatggagtgtccgtataccaacatgtctgatattttgatgtattccattaaattatttagttttttctttttattctcgttaaacagcatttctgtcaacggaccccaacatcgttgaccgattaagttttgattgatttttccgtgtaaggcgtatctagtcagatcgtatagcctatccaataatccatcgtctgtgtgtagatcacatcgtacactttttaattctctatagaagagcgacagacatctggagcaattacagacagcaatttctttattctctacagatgtaagatacttgaagacattcctatgatgatgcagaattttggataacacggtattgatggtatctgttaccataattcctttgatggctgatagtgtcagagcacaagatttccaatctttgacaatttttagcaccattatctttgttttgatatctatatcagacagcatggtgcgtctgacaacacaaggattaagacggaaagatgaaatgattctctcaacatcttcaatggataccttgctattttttctggcattatctatatgtgcgagaatatcctctagagaatcagtatcctttttgatgatagtggatctcaatgacatgggacgtctaaaccttcttattctatcaccagattgcatggtgatttgtcttctttcttttatcataatgtaatctctaaattcatcggcaaattgtctatatctaaaatcataatatgagatgtttacctctacaaatatctgttcgtccaatgttagagtatttacatcagttttgtattccaaattaaacatggcaacggatttaattttatattcctctattaagtcctcgtcgataataacagaatgtagataatcatttaatccatcgtacatggttggaagatgctcgttgacaaaatctttaattgtcttgatgaaggtgggactatatctaacatcttgattaataaaatttataacattgtccataggatactttgtaactagttttatacacatctcttcatcggtaagtttagacagaatatcgtgaacaggtggtatattatattcatcagatatacgaagaacaatgtccaaatctatattgtttaatatattatatagatgtagtgtagctcctacaggaatatctttaactaagtcaatgatttcatcaaccgttagatctattttaaagttaatcatataggcattgatttttaaaaggtatgtagccttgactacattctcattaattaaccattccaagtcactgtgtgtaagaagattatattctatcataagcttgactacatttggtcccgataccattaaagaattcttatgatataaggaaacagattttaggtactcatctactctacaagaattttggagagccttaacgatatcagtgacgtttattatttcaggaggaaaaaacctaacattgagaatatcggaattaatagcttccagatacagtgattttggcaatagtccgtgtaatccataatccagtaacacgagctggtgcttgctagacaccttttcaatgtttaatttttttgaaataagctttgataaagccttcctcgcaaattccggatacatgaacatgtcggcgacatgattaagtattgttttttcattatttttatattttctcaacaagttctcaataccccaatagatgatagaatatcacccaatgcgtccatgttgtctatttccaacaggtcgctatatccaccaatagaagttttcccaaaaaagattctaggaacagttctaccaccagtaatttgttcaaaatagtcacgcaattcattttcgggtttaaattctttaatatcgacaatttcatacgctcctcttttgaaactaaacttatttagaatatccagtgcatttctacaaaaaggacatgtatacttgacaaaaattgtcactttgttattggccaacctttgttgtacaaattcctcggccattttaatatttaagtgatataaaactatctcgacttatttaactctttagtcgagatatatggacgcagatagctatatgatagccaactacagaaggcaaacgctataaaaaacataattacgacgagcatatttataaatatttttattcagcattacttgatatagtaatattaggcacagtcaaacattcaaccactctcgatacattaactctctcattttctttaacaaattctgcaatatcttcgtaaaaagattcttgaaactttttagaatatctatcgactctagatgaaatagcgttcgtcaacatactatgttttgtatacataaaggcgcccattttaacagtttctagtgacaaaatgctagcgatcctaggatcctttagaatcacatagattgacgattcgtctctcttagtaactctagtaaaataatcatacaatctagtacgcgaaataatattatccttgacttgaggagatctaaacaatctagttttgagaacatcgataagttcatcgggaatgacatacatactatctttaatagaactcttttcatccagttgaatggattcgtccttaaccaactgattaatgagatcttctattttatcattttccagatgatatgtatgtccattaaagttaaattgtgtagcgcttctttttagtctagcagccaatactttaacatcactaatatcgatatacaaaggagatgatttatctatggtattaagaattcgtttttcgacatctgtcaaaaccaattcctttttgcctgtatcatccagttttccatcctttgtaaagaaattattttctactagactattaataagactgataaggattcctccataattgcacaatccaaactttttcacaaaactagactttacaagatctacaggaatgcgtacttcaggtttcttagcttgtgattttttcttttgtggacattttcttgtgaccaactcatctaccatttcattgattttagcagtgaaataagctttcaatgcacgggcactgatactattgaaaacgagttgatcttcaaattccgccatttaagttcaccaaacaacttttaaatacaaatatatcaatagtagtagaataagaactataaaaaaaataataattaaccaataccaaccccaacaaccggtattattagttgatgtgactgttttctcatcacttagaacagatttaacaatttctataaagtctgtcaaatcatcttccggagaccccataaatacaccaaatatagcggcgtacaacttatccatttatacattgaatattggcttttctttatcgctatcttcatcatattcatcatcaatatcaacaagtcccagattacgagccagatcttcttctacattttcagtcattgatacacgttcactatctccagagagtccgataacgttagccaccacttctctatcaatgattagtttcttgagtgcgaatgtaatttttgtttccgttccggatctatagaaaactacaggtgtgataattgccttggccaattgtctttctcttttactgagtgattctagttcaccttctatagatctgagaatggatgattctccagtcgaaacatattctaccatggctccgtttaatttgttgatgaagatggattcatccttaaatgttttctctgtaatagtttccaccgaaagactatgcaaagaatttggaatgcgttccttgtgcttaatgtttccatagacggcttctagaagttgatacaacataggactagccgcggtaacttttatttttagaaagtatccatcgcttctatcttgtttagatttatttttataaagtttagtctctccttccaacataataaaagtggaagtcatttgactagataaactatcagtaagttttatagagatagacgaacaattagcgtattgagaagcatttagtgtaacgtattcgatacattttgcattagatttactaatcgattttgcatactctataacacccgcacaagtctgtagagaatcgctagatgcagtaggtcttggtgaagtttcaactctcttcttgattaccttactcatgattaaacctaaataattgtactttgtaatataatgatatatattttcactttatctcatttgagaataaaaatgtttttgtttaaccactgcatgatgtacagatttcggaatcacaaaccaccggtggttttattttatccttgtccaatgtgaattgaatgggagcggatgcgggtttcgtacgtagatagtacattcccgtttttagaccgagactccatccgtaaaaatgcatactcgttagtttggaataactcggatctgctatatggatattcatagattgactttgatcgatgaaggctcccctgtctgcagccatttttatgatcgtcttttgtggaatttcccaaatagttttataaactcgcttaatatcttctggaaggtttgtattctgaatggatccaccatctgccataatcctattcttgatctcatcattccataattttctctcggttaaaactctaaggagatgcggattaactacttgaaattctccagacaatactctccgagtgtaaatattactggtatacggttccaccgactcattatttcccaaaatttgagcagttgatgcagtcggcataggtgccaccaataaactatttctaagaccgtatgttctgattttatcttttagaggttcccaattccaaagatccgacggtacaacattccaaagatcatattgtagaataccgttactggcgtacgatcctacatatgtatcgtatggtccttccttctcagctagttcacaactcgcctctaatgcaccgtaataaatggtttcgaagatcttcttatttagatcttgtgcttccaggctatcaaatggataatttaagagaataaacgcgtccgctaatccttgaacaccaataccgataggtctatgtctcttattagagatttcagcttctggaataggataataattaatatctataattttattgagatttctgacaattactttgaccacatccttcagtttgagaaaatcaaatcgcccatctattacaaacatgttcaaggcaacagatgccagattacaaacggctacctcattagcatccgcatattgtattatctcagtgcaaagattactacacttgatagttcctaaattttgttgattactctttttgttacacgcatccttataaagaatgaatggagtaccagtttcaatctgagattctataatcgctttccagacgactcgagcctttattatagatttgtatctcctttctctttcgtatagtgtatacaatcgttcgaactcgtctccccaaacattgtccaatccaggacattcatccggacacatcaacgaccactctccgtcatccttcactcgtttcataaagagatcaggaatccaaagagctataaatagatctctggttctatgttcctcgtttcctgtattctttttaagatcgaggaacgccataatatcagaatgccacggttccaagtatatggccataactccaggccgtttgtttcctccctgatctatgtatctagcggtgttattataaactctcaacattggaataataccgtttgatataccattggtaccggagatatagcttccactggcacgaatattactaattgatagacctattccccctgccattttagagattaatgcgcatcgttttaacgtgtcatagataccctctatgctatcatcgatcatgttaagtagaaaacagctagacatttggtgacgactagttcccgcattaaataaggtaggagaagcgtgcgtaaaccatttttcagaaagtagattgtacgtctcaatagctgagtctatatcccattgatgaattcctactgcgacacgcattaacatgtgctgaggtctttcaacgatcttgttgtttattttcaacaagtaggatttttccaaagttttaaaaccaaaatagttgtatgaaaagtctcgttcgtaaataataaccgagttgagtttatccttatatttgttaactatatccatggtgatacttgaaataatcggagaatgtttcccatttttaggattaacatagttgaataaatcctccatcacttcactaaatagtttttttgtttccttgtgtagatttgatacggctattctggcggctagaatggcataatccggatgttgtgtagtacaagtggctgctatttcggctgccagagtgtccaattctaccgttgttactccattatatattccttgaataaccttcatagctattttaataggatctatatgatccgtgtttaagccataacataattttctaatacgagacgtgattttatcaaacatgacattttccttgtatccatttcgtttaatgacaaacatttttgttggtgtaataaaaaaattatttaacttttcattaatagggatttgacgtacgtagcgtacaaaatgattgttcctggtatatagataaagagtcctatatatttgaaaatcgttacggctcgattaaactttaatgattgcatagtgaatatatcattaggatttaactccttgactatcagggcggcaccagaaattaccatcaaaagcattaatacagttatgcctatcgcagttagaacggttatagcatccaccatttatatctaaaaattagatcaaagaatatgtgacaaagtcctagttgtatattgagaattgacaaaacaatgtttcttacatattttttttttattagtaaccgacttaatagtaggaactggaaaactagacttgattattctataagtatagatacccttccaaataatattctctttgataaaagttccagaaaatgtagaattttttaaaaagttatcttttgctattaccaagattgtgtttagacgcttattattaatatgagtgatgaaatccacaccgcctctagatatcgcctttatttccacattagatggtaaatccaatagtgaaactatctttttaggaatgtatggactcgcgtttagaggagtgaacgtcttgggcgtcggaaaggatgattcgtcaaacgaataaacaatttcacaaatggatgttaatgtattagtaggaaattttttgacgctagtggaattgaaaattctaatggatgatgttctacctatttcatccgataacatgttaatttccgacaccaacggttttaatatttcgatgatatacggtagtctctctttcggacttatatagcttattccacaatacgagtcattatatactccaaaaaacaaaataactagtataaaatctgtatcgaatgggaaaaacgaaattatcgacataggtatagaatccggaacattgaacgtattaatacttaattctttttctgtggtaagtaccgataggttattgacattgtatggttttaaatattctataacttgagacttgatagatattagtgatgaattgaaaattatttttatcaccacgtgtgtttcaggatcatcgtcgacgcccgtcaaccaaccgaacggagtaaaataaatatcattaatatatgctctagatattagtatttttatcaatcctttgattatcatcttctcgtaggcgaatgattccatgatcaagagtgatttaagaacatcctccggagtattaatgggcttagtaaacagtccatcgttgcaataataaaagttatccaagttaaaggatattatgcattcgtttaaagatatcacctcatctgacggagacaattttttggtaggttttagagactttgaagctacttgtttaacaaagttattcatcgtcgtttactattctatttaattttgtagttaatttatcacatatcacattaattgactttttggtccatttttccatacgtttatattcttttaatcctgcgttatccgtttccgttatatccagtgatagatcgtgcaggttaaatagaatgctcttaaataatgtcatttttttatccgctaaaaatttaaagaatgtataaacttttttcaaagatttaaaacttttaggtggtgtcctagtacacaatatcataaacaaactaataaacatcccgcattcagattccaacagctgattaacttccacattaatacagcctattttcgctccaaatgtacattcgaaaaatctgaataaaacatcaatgtcgcaatttgtattatccaatacagaatgtttgtgattcgtgttaaaaccatcggagaaggaatagaaataaaaattattatagtggtggaattcagttggaatattgcctccggagtcataaaaggatactaaacattgttttttatcataaattacacatttccaatgagacaaataacaaaatccaaacattacaaatctagaggtagaacttttaattttgtctttaagtatatacgataagatatgtttattcataaacgcgtcaaatttttcatgaatcgctaaggagtttaagaatctcatgtcaaattgtcctatataatccacttcggatccataagcaaactgagagactaagttcttaatacttcgattgctcatccaggctcctctctcaggctctattttcatcttgacgacctttggattttcaccagtatgtattcctttacgtgataaatcatcgattttcaaatccatttgtgagaagtctatcgccttagatactttttcccgtagtcgaggtttaaagaaatacgctaacggtatactagtaggtaactcaaaaacatcatatatagaatggtaacgcgtctttaactcgtcggttaactctttcttttgatcgagttcgtcgctactattgggtctgctcaggtgccccgactctactagttccaacatcataccgataggaatacaagacactttgccggcggttgtagatttatcatatttttccactacatatccgttacaatttgttaaaaatttagatacatctatattgctacataatccagctagtgaatatatatgacataataaattggtaaatcctagttctggtattttactaattactaaatctgtatatctttccatttatcatggaaaagaatttaccagatatcttcttttttccaaactgcgttaatgtattctcttacaaatattcacaagatgaattcagtaatatgagtaaaacggaacgtgatagtttctcattggccgtgtttccagttataaaacatagatggcataacgcacacgttgtaaaacataaaggaatatacaaagttagtacagaagcacgtggaaaaaaagtatctcctccatcactaggaaaacccgcacacataaacctaaccgcgaagcaatatatatacagtgaacacacaataagctttgaatgttatagttttctaaaatgtataacaaatacagaaatcaattcgttcgatgagtatatattaagaggactattagaagctggtaatagtttacagatattttccaattccgtaggtaaacgaacagatactataggtgtactagggaataagtatccatttagcaaaattccattggcctcattaactcctaaagcacaacgagagatattttcagcgtggatttctcatagacctgtagttttaactggaggaactggagtgggtaagacgtcacaggtacccaagttattgctttggtttaattatttatttggtggattctctactctagataaaatcactaactttcacgaaagaccagtcattctatctcttcctaggatagctttagttagattgcatagcaataccattttaaaatcattgggatttaaggtactagatggatctcctatttctttacggtacggatctataccggaagaattaataaacaaacaaccaaaaaaatatggaattgtattttctacccataagttatctctaacaaaactatttagttatggcactcttattatagacgaagttcatgagcatgatcaaataggagatattattatagcagtagcgagaaagcatcatacgaaaatagattctatgtttttaatgactgccacgttagaggatgaccgagaacggctaaaagtatttttacctaatcccgcatttatacatattcctggagatacactgtttaaaattagcgaggtatttattcataataagataaatccatcttccagaatggcatacatagaagaagaaaagagaaatttagttactgctatacagatgtatactcctcctgatggatcatccggtatagtctttgtggcatccgttgcacagtgtcacgaatataaatcatatttagaaaaaagattaccgtatgatatgtatattattcatggtaaggtcttagatatagacgaaatattagaaaaagtgtattcatcacctaatgtatcgataattatttctactccttatttggaatccagcgttactatacgcaatgttacacacatttatgatatgggtaaagtttttgtccccgctccttttggaggatcgcaagaatttatttctaaatctatgagagatcaacgaaaaggaagagtaggaagagttaatcctggtacatacgtctatttctatgatctgtcttatatgaagtctatacagcgaatagattcagaatttctacataattatatattgtacgctaataagtttaatctaacactccccgaagatttgtttataatccctacaaatttggatattctatggcgtacaaaggaatatatagactcgttcgatattagtacagaaacatggaataaattattatccaattattatatgaagatgatagagtatgctaaactttatgtactaagtcctattctcgctgaggagttggataactttgagaggacgggagaattaactagtattgtacgagaagccattttatctctaaatttacgaattaagattttaaattttaaacataaagatgatgatacgtatatacacttttgtaaaatattattcggtgtctataacggaacaaacgctactatatattatcatagacctctaacgggatatatgaatatgatttcagatactatatttgttcctgtagataataactaaaaatcaaactctaatgaccacatctttttttagagatgaaaaattttctacatctccttttgtagacacgactaaacattttgcaaaaaaaagtttattagtgtttagataatcgtatacttcatcagtgtagatagtaaatgtgaacaaataaaaggtattcttactcaatagattggtaaattccatagaatatattaatcctttcttcttgagatcccacatcatttcaaccagagacgttttatccaatgatttacctcgtactataccacatacaaaactagattttgcagtgacgtcgtacctggtattcctaccaaacaaaattttacttttagttcttttagaaaattctaaggtagaatctctatttgccaatatgtcatctatggaattaccactagcaaaaaatgatagaaatatatattgatacatcgcagctggttttgatctactatactttaaaaacgaatcagattccataattgcctgtatatcatcagctgaaaaactatgttttacacgtattccttcggcatttctttttaatgatatatcttgtttagacaatgataaagttatcatgtccatgagagacgcgtctccgtatcgtataaatatttcattagatgttagacgcttcattaggggtatacttctataaggtttcttaatcagtccatcattggttgcgtcaagaactactatcggatgttgttgggtatctctagtgttacacatggccttactaaagtttgggtaaataactatgatatctctattaattatagatgcatatatttcattcgtcaaggatattagtatcgacttgctatcgtcattaatacgtgtaatgtaatcatataaatcatgcgatagccaaggaaaattcaaatagatgttcatcatataatcgtcgctataattcatattaatacgttgacattgactaatttgtaatatagcctcgccacgaagaaagctctcgtattcagtttcatcgataaaggataccgttaaatataactggttgccgatagtctcatagtctattaagtggtaagtttcgtacaaatacagaatccctaaaatattatctaatgttggattaatctttaccataactgtataaaatggagacggagtcataactattttaccgtttgtacttactggaatagacgaaggaataatctccggacatgctggtaaagacccaaatgtctgtttgaagaaatccaatgttccaggtcctaatctcttaacaaaaattacgatattcgatcccgatatcctttgcattctatttaccagcatatcacgaactatattaagattatctatcatgtctattctcccaccgttatataaatcgcctccgctaagaaacgttagtatatccatacaatggaatacttcatttctaaaatagtattcgttttctaattctttaatgtgaaatcgtatactagaaagggaaaaattatctttgagttttccgttagaaaagaaccacgaaactaatgttctgattgcgtccgattccgttgctgaattaatggatttacaccaaaaactcatataacttctagatgtagaagcattcgctaaaaaattagtagaatcaaaggatataagtagatgttccaacaagtgagcaattcccaagatttcatctatatcattctcgaatccgaaattagaaattcccaagtagatatcctttttcatccgatcgttgatgaaaatacgaactttattcggtaagacaatcatttactaaggagtaaaataggaagtaatgttcgtatgtcgttatcatcgtataaattaaaggtgtgttttttaccattaagtgacattataattttaccaatattggaattataatataggtgtatttgcgcactcgcgacggttgatgcatcggtaaatatagctgtatctaatgttctagtcggtatttcatcatttcgctgtctaataatagcgttttctctatctgtttccattacagctgcctgaagtttattggtcggataatatgtaaaataataagaaatacatacgaataacaaaaataaaataagatataataaagatgccatttagagatctaattttgttcaacttgtccaaattcctacttacagaagatgaggaatcgttggagatagtgtcttccttatgtagaggatttgaaatatcttatgatgacttgataacttactttccagataggaaataccataaatatatttctaaagtatttgaacatgtagatttatcggaggaattaagtatggaattccatgatacaactttgcgagatttagtctatcttagattgtacaagtattccaagtgtatacggccgtgttataaattaggagataatctaaaaggcatagttgttataaaggacaggaatatttatattagggaagcaaatgatgacttgatagaatatctcctcaaggaatacactcctcagatttatacatattctaatgagcgcgtccccataactggttcaaaattaattctttgtggattttctcaagttacatttatggcgtatacaacgtcgcatataacaacaaataaaaaggtagatgttctcgtttccaaaaaatgtatagatgaactagtcgatccaataaattatcaaatacttcaaaatttatttgataaaggaagcggaacaataaacaaaatactcaggaagatattttattcggtaacaggtggccaaactccataggtagctttttctatttcggattttagaatttccaaattcaccagcgatttatctgttttggtgaaatccaaggatttattaatgtccacaaatgccatttgttttgtctgtggattgtatttgaaaatggaaacgatgtagttagatagatgcgctgcgaagtttcctattagggttccgcgcttcacgtcacccagcatacttgaatcaccatcctttaaaaaaaatgataagatatcaacatggagtatatcatactcggattttaattcttctactgcatcactgacattttcacaaatactacaatacggtttaccgaaaataatcagtacgttcttcatttatgggtatcaaaaacttaaaatcgttactgctggaaaataaatcactgacgatattagatgataatttatacaaagtatacaatggaatatttgtggatacaatgagtatttatatagccgtcgccaattgtgtcagaaacttagaagagttaactacggtattcataaaatacgtaaacggatgggtaaaaaagggagggcatgtaaccctttttatcgatagaggaagtataaaaattaaacaagacgttagagacaagagacgtaaatattctaaattaaccaaggacagaaaaatgctagaattagaaaagtgtacatccgaaatacaaaatgttaccggatttatggaagaagaaataaaggcagaaatgcaattaaaaatcgataaactcacatttcaaatatatttatctgattctgataacataaaaatatcattgaatgagatactaacacatttcaacaataatgagaatgttacattattttattgtgatgaacgagacgcagaattcgttatgtgtctcgaggctaaaacacatttctctaccacaggagaatggccgttgataataagtaccgatcaggatactatgctatttgcatctgctgataatcatcctaagatgataaaaaacttaactcaactgtttaaatatgttccatctgcagaggataactatttagcaaaattaacggcgttagtgaatggatgtgatttctttcctggactctatggggcatctataacacccaacaacttaaacaaaatacaattgtttagtgattttacaatcgataatatagtcactagtttggcaattaaaaattattatagaaagactaactctaccgtagacgtgcgtaatattgttacgtttataaacgattacgctaatttagacgatgtctactcgtatattcctccttgtcaatgcactgttcaagaatttatattttccgcattagatgaaaaatggaatgaatttaaatcatcttatttagaaagcgtgccgttaccctgccaattaatgtatgcgttagaaccacgcaaggagattgatgtttcagaagttaaaactttatcatcttatatagatttcgaaaatactaaatcagatatcgatgttataaaatctatatcctcgatcttcggatattctaacgaaaactgtaacacgatagtattcggcatctataaggataatttactactgagtataaatagttcattttactttaacgatagtctgttaataaccaatactaaaagtgataatataataaatataggttactagattaaaaatggtgttccaactcgtgtgctctacgtgcggcaaagatatttctcacgaacgatataaattgattatacgaaaaaaatcattaaaggatgtactcgtcagtgtaaagaacgaatgttgtaggttaaaattatctacacaaatagaacctcaacgtaacttaacagtgcaacctctattggatataaactaatatggatccggttaattttatcaagacatatgcgcctagaggttctattatttttattaattataccatgtcattaacaagtcatttgaatccatcgatagaaaaacatgtgggtatttattatggtacgttattatcggaacacttggtagttgaatcaacatatagaaaaggagttcgaatagtcccattggatagtttttttgaaggatatcttagtgcaaaagtatacatgttagagaatattcaagttatgaaaatagcagctgatacgtcattaactttattgggtattccgtatggatttggtcatgatagaatgtattgttttaaattggtagctgactgttataaaaatgccggtattgatacatcgtctaaacgaatattaggtaaagatatttttctgagccaaaacttcacagacgataatagatggataaagatatatgattctaataatttaacattttggcaaattgattaccttaaagggtgagttaatatgcataactactcctccgttgttttttccctcgttctttttcttaacgttgtttgccatcactctcataatgtaaagatattctaaaatggtaaacttttgcatatcggacgcagaaattggtataaatgttgtaattgtattatttcccgtcaatggactagtcacagctccatcagttttatatcctttagagtatttctcactcgtgtctaacattctagagcattccatgatctgtttatcgttgatattggccggaaagatagattttttattttttattatattactattggcaattgtagatataacttctggtaaatatttttctaccttttcaatctcttctattttcaagccggctatatattctgctatattgttgctagtatcaataccttttctggctaagaagtcatatgtggtattcactatatcagttttaactggtagttccattagcctttccacttctgcagaataatcagaaattggttctttaccagaaaatccagctactataataggctcaccgatgatcattggcaaaatcctatattgtaccagattaatgagagcatatttcatttccaataattctgctagttcttgagacattgatttatttgatgaatctagttggttctctagatactctaccatttctgccgcatacaataacttgttagataaaatcagggttatcaaagtgtttagcgtggctagaatagtgggcttgcatgtattaaagaatgcggtagtatgagtaaaccgttttaacgaattatatagtctccagaaatctgtggcgttacatacatgagccgaatgacatcgaagattgtccaatatttttaatagctgctctttgtccattatttctatatttgactcgcaacaattgtagataccattaatcaccgattcctttttcgatgccggacaatagcacaattgtttagctttggactctatgtattcagaattaatagatatatctcttaatacagattgcactatacattttgaaactatgtcaaaaattgtagaacgacgctgttctgcagccatttaactttaaataatttacaaaaatttaaaatgagcatccgtataaaaatcgataaactgcgccaaattgtggcatatttttcagagttcagtgaagaagtatctataaatgtagactcgacggatgagttaatgtatatttttgccgccttgggcggatctgtaaacatttgggccattatacctctcagtgcatcagtgttctaccgcggagccgaaaatattgtgtttaatcttcctgtgtccaaggtaaaatcgtgtttgtgtagttttcacaatgatgccatcatagatatagaacctgatctggaaaataatctagtaaaactttctagttatcatgtagtaagtgtcgattgtaataaggaactgatgcctattaggacagatactactatttgtctaagtatagatcaaaagaaatcttacgtgtttaattttcacaagtatgaagaaaaatgttgtggtagaaccgtcattcatttagaatggttgttgggctttatcaagtgtattagtcagcatcagcatttggctattatgtttaaagatgacaatattattatgaagactcctggtaatactgatgcattttccagggaatattctatgactgaatgttctcaagaactacaaaagttttctttcaaaatagctatctcgtctctcaacaaactacgaggattcaaaaagagagtcaatgtttttgaaactagaatcgtaatggataatgacgataacattttaggaatgttgttttcggatagagttcaatcctttaagatcaacatctttatggcgtttttagattaatactttcaatgagataaatatgggtggcggagtaagtgttgagctccctaaacgggatccgcctccgggagtacccactgatgagatgttattaaacgtggataaaatgcatgacgtgatagctcccgctaagcttttagaatatgtgcatataggaccactagcaaaagataaagaggataaagtaaagaaaagatatccagagtttagattagtcaacacaggacccggtggtctttcggcattgttaagacaatcgtataatggaaccgcacccaattgctgtcgcacttttaatcgtactcattattggaagaaggatggaaagatatcagataagtatgaagagggtgcagtattagaatcgtgttggccagacgttcacgacaccggaaaatgcgatgttgatttattcgactggtgtcagggggatacgttcgatagaaacatatgccatcagtggatcggttcagcctttaataggagtaatagaactgtagagggtcaacaatcgttaataaatctgtataataagatgcaaacattatgtagtaaagatgctagtgtaccaatatgtgaatcatttttgcatcatttacgcgcacacaatacagaagatagcaaagagatgatcgattatattctaagacaacagtctgcggactttaaacagaaatatatgagatgtagttatcccactagagataagttagaagagtcattaaaatatgcggaacctcgagaatgttgggatccagagtgttcgaatgccaatgttaatttcttgctaacacgtaattataataatttaggactttgcaatattgtacgatgtaatactagcgtgaacaacttacagatggataaaacttcctcattaagattgtcatgtggattaagcaatagtgatagattttctactgttcccgtcaatagagcaaaagtagttcaacataatattaaacactcgttcgacctaaaattgcatttgatcagtttattatctctcttggtaatatggatactaattgtagctatttaaatgggtgccgcggcaagcatacagacgacggtgaatacactcagcgaacgtatctcgtctaaattagaacaagaagcgaatgctagtgctcaaacaaaatgtgatatagaaatcggaaatttttatatccgacaaaaccatggatgtaacctcactgttaaaaatatgtgctctgcggacgcggatgctcagttggatgctgtgttatcagccgctacagaaacatatagtggattaacaccggaacaaaaagcatacgtgccagctatgtttactgctgcgttaaacattcagacgagtgtaaacactgttgttagagattttgaaaattatgtgaaacagacttgtaattctagcgcggtcgtcgataacaaattaaagatacaaaacgtaatcatagatgaatgttacggagccccaggatctccaacaaatttggaatttattaatacaggatctagcaaaggaaattgtgccattaaggcgttgatgcaattgacgactaaggccactactcaaatagcacctaaacaagttgctggtacaggagttcagttttatatgattgttatcggtgttataatattggcagcgttgtttatgtactatgccaagcgtatgttgttcacatccaccaatgataaaatcaaacttattttagccaataaggaaaacgtccattggactacttacatggacacattctttagaacttctccgatggttattgctaccacggatatgcaaaactgaaaatatattgataatattttaatagattaacatggaagttatcactgatcgtctagacgatatagtgaaacaaaatatagcggatgaaaaatttgtagattttgttatacacggtctagagcatcaatgtcctgctatacttcgaccattaattaggttgtttattgatatactattatttgttatagtaatttatatttttacggtacgtctagtaagtagaaattatcaaatgttgttggcgttggtggcgctagtcatcacattaactattttttattactttatactataatagtactagactgacttctaacaaacatctcacctgccataaataaatgcttgatattaaagtcttctatttctaacactattccatctgtggaaaataatactctgacattatcgctaattgacacatcggtgagtgatatgcctataaagtaataatcttctttgggcacatataccagtgtaccaggttctaacaacctatttactggtgctcctatagcatactttttctttaccttgagaatatccatcgtttgcttggtcaatagcgatatgtgattttttatcaaccactcgaaaaagtaattggagtgttcatatcctctacgggctattgtctcatggccgtgtatgaaatttaagtaacacgactgtggtagatttgttctatagagccggttgccgcaaatagatagaactaccaatatgtctgtacaaatgttaaacattaattgattaacagaaaaaacaatgttcgttctgggaatagaaaccagatcaaaacaaaattcgttagaatatatgccacgtttatacattgaatataaaataactacagtttgaaaaataacagtatcatttaaacatttaacttgcggggttaatctcacaactttactgtttttgaactgttcaaaatatagcatagatccgtgagaaatacgtttagccgcctttaatagaggaaatcccaccgcctttctggatctcaccaacgacgatagttctgaccagcaactcatttcttcatcatccacctgttttaacatataataggcaggagatagatatccgtcattgcaatattccttctcgtaggcacacaatctaatattgataaaatctccattctcttctctgcatttattatcttgtttcggtggctgattaggctgtagtcttggtttaggctttggtatatcgttgttgaatctattttggtcattaaatctttcatttcttcctggtatatttttatcacctcgtttggttggatttttgtctatattatcgtttgtaacatcggtacgggtattcatttatcacaaaaaaaacttctctaaatgagtctactgctagaaaacctcatcgaagaagataccatattttttgcaggaagtatatctgagtatgatgatttacaaatggttattgccggcgcaaaatccaaatttccaagatctatgctttctatttttaatatagtacctagaacgatgtcaaaatatgagttggagttgattcataacgaaaatatcacaggagcaatgtttaccacaatgtataatataagaaacaatttgggtctaggagatgataaactaactattgaagccattgaaaactatttcttggatcctaacaatgaagttatgcctcttattattaataatacggatatgactgccgtcattcctaaaaaaagtggtaggagaaagaataagaacatggttatcttccgtcaaggatcatcacctatcttgtgtattttcgaaactcgtaaaaagattaatatttataaagaaaatatggaatccgcgtcgactgagtatacacctatcggagacaacaaggctttgatatctaaatatgcgggaattaatatcctaaatgtgtattctccttccacatccataagattgaatgccatttacggattcaccaataaaaataaactagagaaacttagtactaataaggaactagaatcgtatagttctagccctcttcaagaacccattaggttaaatgattttctgggactattggaatgtgttaaaaagaatattcctctaacagatattccgacaaaggattgattactataaatggagaatgttcctaatgtatactttaatcctgtgtttatagagcccacgtttaaacattctttattaagtgtttataaacacagattaatagttttatttgaagtattcgttgtattcattctaatatatgtattttttagatctgaattaaatatgttcttcatgcctaaacgaaaaatacccgatcctattgatagattacgacgtgctaatctagcgtgtgaagacgataaattaatgatctatggattaccatggatgacaactcaaacatctgcgttatcaataaatagtaaaccgatagtgtataaagattgtgcaaagcttttgcgatcaataaatggatcacaaccagtatctcttaacgatgttcttcgcagatgatgattcattttttaagtatttggctagtcaagatgatgaatcttcattatctgatatattgcaaatcactcaatatctagactttctgttattattattgatccaatcaaaaaataaattagaagccgtgggtcattgttatgaatctctttcagaggaatacagacaattgacaaaattcacagactttcaagattttaaaaaactgtttaacaaggtccctattgttacagatggaagggtcaaacttaataaaggatatttgttcgactttgtgattagtttgatgcgattcaaaaaagaatcctctctagctaccaccgcaatagatcctgttagatacatagatcctcgtcgtgatatcgcattttctaacgtgatggatatattaaagtcgaataaagtgaacaataattaattctttattgtcatcatgaacggcggacatattcagttgataatcggccccatgttttcaggtaaaagtacagaattaattagacgagttagacgttatcaaatagctcaatataaatgcgtgactataaaatattctaacgataatagatacggaacgggactatggacgcatgataagaataattttgaagcattggaagcaactaaactatgtgatgtcttggaatcaattacagatttctccgtgataggtatcgatgaaggacagttctttccagacattgtttaattctgtgagcgtatggcaaacggtaccgagctcaaaaattgaaaaactagcgtctttttttgctcgaagtcgaccaccatggagttcctctgggcccctctcttgggtctgtgctgcagtctggccgctgctgatcgccacaccgtcttctggaacagttcaaatcccaagttccggaatgaggactacaccatacatgtgcagctgaatgactacgtggacatcatctgtccgcactatgaagatcactctgtggcagacgctgccatggagcagtacatactgtacctggtggagcatgaggagtaccagctgtgccagccccagtccaaggaccaagtccgctggcagtgcaaccggcccagtgccaagcatggcccggagaagctgtctgagaagttccagcgcttcacacctttcaccctgggcaaggagttcaaagaaggacacagctactactacatctccaaacccatccaccagcatgaagaccgctgcttgaggttgaaggtgactgtcagtggcaaaatcactcacagtcctcaggcccatgacaatccacaggagaagagacttgcagcagatgacccagaggtgcgggttctacatagcatcggtcacagtgctgccccacgcctcttcccacttgcctggactgtgctgctccttccacttctgctgctgcaaaccccgtgattaattaatttttatcgatctaattcaacaatgtctggagagctcggatccttctgtgagcgtatggcaaacgaaggaaaaatagttatagtagccgcactcgatgggacatttcaacgtaaaccgtttaataatattttgaatcttattccattatctgaaatggtggtaaaactaactgctgtgtgtatgaaatgctttaaggaggcttccttttctaaacgattgggtgaggaaaccgagatagagataataggaggtaatgatatgtatcaatcggtgtgtagaaagtgttacgtcggctcataatattatattttttatctaaaaaactaaaaataaacattgattaaattttaatataatacttaaaaatggatgttgtgtcgttagataaaccgtttatgtattttgaggaaattgataatgagttagattacgaaccagaaagtgcaaatgaggtcgcaaaaaaactgccgtatcaaggacagttaaaactattactaggagaattattttttcttagtaagttacagcgacacggtatattagatggtgccaccgtagtgtatataggatctgctcccggtacacatatacgttatttgagagatcatttctataatttaggagtgatcatcaaatggatgctaattgacggccgccatcatgatcctattttaaatggattgcgtgatgtgactctagtgactcggttcgttgatgaggaatatctacgatccatcaaaaaacaactgcatccttctaagattattttaatttctgatgtgagatccaaacgaggaggaaatgaacctagtacggcggatttactaagtaattacgctctacaaaatgtcatgattagtattttaaaccccgtggcgtctagtcttaaatggagatgcccgtttccagatcaatggatcaaggacttttatatcccacacggtaataaaatgttacaaccttttgctccttcatattcagctgaaatgagattattaagtatttataccggtgagaacatgagactgactcgagttaccaaatcagacgctgtaaattatgaaaaaaagatgtactaccttaataagatcgtccgtaacaaagtagttgttaactttgattatcctaatcaggaatatgactattttcacatgtactttatgctgaggaccgtgtactgcaataaaacatttcctactactaaagcaaaggtactatttctacaacaatctatatttcgtttcttaaatattccaacaacatcaactgaaaaagttagtcatgaaccaatacaacgtaaaatatctagcaaaaattctatgtctaaaaacagaaatagcaagagatccgtacgcagtaataaatagaaacgtactactgagatatactaccgatatagagtataatgatttagttactttaataaccgttagacataaaattgattctatgaaaactgtgtttcaggtatttaacgaatcatccataaattatactccggttgatgatgattatggagaaccaatcattataacatcgtatcttcaaaaaggtcataacaagtttcctgtaaattttctatacatagatgtggtaatatctgacttatttcctagctttgttagactagatactacagaaactaatatagttaatagtgtactacaaacaggcgatggtaaaaagactcttcgtcttcccaaaatgttagagacggaaatagttgtcaagattctctatcgccctaatataccattaaaaattgttagatttttccgcaataacatggtaactggagtagagatagccgatagatctgttatttcagtcgctgattaatcaattagtagagatgagataagaacattataataatcaataatatatcttatatctcgtttagaaaaatgctaatattaaaatagctaacgctagtaatccaatcggaagccatttgatatctataatagggtatctaatttcctgattcagatagcggacagctatattctcggtagctactcgtttggaatcacaaacattatttacatctaatttactatctgtaatggaaacgtttcccaatgaaatggtacaatccgatacattgcattttgttatatttttttttaaagaggctggtaacaacgcatcgcttcgtttacatggctcgtaccaacaataatagggtaatcttgtatctattcctatccgtactatgcttttatcaggataaatacatttacatcgtatatcgtctttgttagcatcacagaatgcataaatttgttcgtccgtcatgataaaaatttaaagtgtaaatataactattatttttatagttgtaataaaaagggaaatttgattgtataccttcggttctttaaaagaaactgacttgataaaaatggctgtaatctctaaggttacgtatagtctatatgatcaaaaagagattaatgctacagatattatcattagtcatgttaaaaatgacgacgatatcggtaccgttaaagatggtagactaggtgctatggatggggcattatgtaagacttgtgggaaaacggaattggaatgtttcggtcactggggtaaagtaagtatttataaaactcatatagttaagcctgaatttatttcagaaattattcgtttactgaatcatatatgtattcactgcggattattgcgttcacgagaaccgtattccgacgatattaacctaaaagagttatcgggacacgctcttaggagattaaaggataaaatattatccaagaaaaagtcatgttggaacagtgaatgtatgcaaccgtatcaaaaaattactttttcaaagaaaaaggtttgtttcgtcaacaagttggatgatattaacgttcctaattctctcatctatcaaaagttaatttctattcatgaaaagttttggccattattagaaattcatcaatatccagctaacttattttatacagactactttcccatccctccgttgattattagaccggctattagtttttggatagatagtatacccaaagaaaccaatgaattaacttacttattaggtatgatcgttaagaattgtaacttgaatgctgatgaacaggttatccagaaggcggtaatagaatacgatgatattaaaattatttctaataacacttccagtatcaatttatcatatattacatccggcaaaaataatatgattagaagttatatcgtcgcccgacgaaaagatcagacggctagatctgtaattggtcccagtacatctatcaccgttaatgaggtaggaatgcccgcatatattagaaatacacttacagaaaagatatttgttaatgcctttacagtggataaagttaaacaactattagcatcaaaccaagttaaattttactttaataaacgattaaaccaattaacaagaatacgccaaggaaagtttatcaaaaataaaatacatttattgcctggtgattgggtagaagtagctgttcaagaatatacaagtattatttttggaagacagccgtctctacatagatacaacgtcatcgcttcatctatcagagctaccgaaggagatactatcaaaatatctcccggaattgccaactctcaaaatgctgatttcgacggagatgaagaatggatgatattagaacaaaatcctaaagctgtaattgaacaaagtattcttatgtatccgacgacgttactcaaacacgatattcatggagcccccgtttatggatctattcaagatgaaatcgtagcagcgtattcattgtttaggatacaagatctttgtttagatgaagtattgaacatcttggggaaatatggaagagagttcgatcctaaaggtaaatgtaaattcagcggtaaagatatctatacttacttgataggtgaaaagattaattatccgggtctcttaaaggatggtgaaattattgcaaacgacgtagatagtaattttgttgtggctatgaggcatctgtcattggctggactcttatccgatcataagtcgaacgtggaaggtatcaactttattatcaagtcatcttatgtttttaagagatatctatctatttacggttttggggtgacattcaaagatctgagaccaaattcgacgttcactaataaattggaggccatcaacgtagaaaaaatagaacttatcaaagaagcatacgccaaatatctcaacgatgtaagagacgggaaaatagttccattatctaaagctttagaggcggactatgtggaatccatgttatccaacttgacaaatcttaatatccgagagatagaagaacatatgagacaaacgctgatagatgatccagataataacctcctgaaaatggccaaagcgggttataaagtaaatcctacagaactaatgtatattctaggtacgtatggacaacaaaggattgatggtgaaccagcagagactcgagtattgggtagagtcttaccttactatcttccagactctaaggatccagaaggaagaggttacattcttaattctttaacaaaaggattaacaggttctcaatattacttttcgatgctggttgcaagatctcaatctactgatatcgtctgtgaaacatcacgtaccggaacactggctagaaaaatcattaaaaagatggaggatatggtggtcgacggatacggacaagtagttataggtaatacgctcatcaagtacgccgccaattataccaaaattctaggctcagtatgtaaacctgtagatcttatctatccagatgagtccatgacttggtatttggaaattagtgctctgtggaataaaataaaacagggattcgtttactctcagaaacagaaacttgcaaagaagacattggcgccgtttaatttcctagtattcgtcaaacccaccactgaggataatgctattaaggttaaggatctgtacgatatgattcataacgtcattgatgatgtgagagagaaatacttctttacggtatctaatatagattttatggagtatatattcttgacgcatcttaatccttctagaattagaattacaaaagaaacggctatcactatctttgaaaagttctatgaaaaactcaattatactctaggtggtggaactcctattggaattatttctgcacaggtattgtctgagaagtttacacaacaagccctgtccagttttcacactactgaaaaaagtggtgccgtcaaacaaaaacttggtttcaacgagtttaataacttgactaatttgagtaagaataagaccgaaattatcactctggtatccgatgatatctctaaacttcaatctgttaagattaatttcgaatttgtatgtttgggagaattaaatccagacatcactcttcgaaaagaaacagataggtatgtagtagatataatagtcaatagattatacatcaagagagcagaaattaccgaattagtcgtcgaatatatgattgaacgattcatctcctttagcgtcattgtaaaggaatggggtatggaaacattcattgaggacgaggataatattagatttactgtctatctaaatttcgttgaaccagaggaattgaatcttagtaagtttatgatggttcttccgggggcagccaacaagggaaagattagtaaattcaagattcctatctctgattatacgggttatgacgacttcaatcaaacaaaaaagctcaataagatgactgtagaactcatgaatctaaaagaattaggttctttcgatttggaaaacgtcaacgtgtatcctggagtatggaatacatacgatatcttcggtatcgaggccgctcgtgaatacttgtgcgaagccatgttaaacacctatggagaagggttcgattatctgtatcagccttgtgatcttctcgctagtttactatgtgctagttacgaaccagaatcagtgaataaattcaagttcggcgcagctagtactcttaagagagctacgttcggagacaataaagcattgttaaacgcggctcttcataaaaagtcagaacctattaacgataatagtagctgccacttttttagcaaggtccctaatataggaactggatattacaaatactttatcgacttgggtcttctcatgagaatggaaaggaaactatctgataagatatcttctcaaaagatcaaggaaatggaagaaacagaagacttttaattcttatcaataacatatttttctatgatctgtcttttaaacgatggattttccacaaatgcgcctctcaagtccctcatagaatgatacacgtataaaaaatatagcataggcaatgactccttatttttagacattagatatgccaaaatcatagccccgcttctatttactcccgcagcacaatgaaccaacacgggctcgtttcgttgatcacatttagataaaaaggcggttacgtcgtcaaaatatttactaatatcggtagttgtatcatctaccaacggtatatgaataatattaatattagagttaggtaatgtatatttatccatcgtcaaatttaaaacatatttgaacttaacttcagatgatggtgcatccatagcatttttataatttcccaaatacacattattggttacccttgtcattatagtgggagatttggctctgtgcatatctccagttgaacgtagtagtaagtatttatacaaacttttcttatccatttataacgtacaaatggataaaactactttatcggtaaacgcgtgtaatttagaatacgttagagaaaaggctatagtaggcgtacaagcagccaaaacatcaacacttatattctttgttattatattggcaattagtgcgctattactctggtttcagacgtctgataatccagtctttaatgaattaacgagatatatgcgaattaaaaatacggttaacgattggaaatcattaacggatagcaaaacaaaattagaaagtgatagaggtagacttctagccgctggtaaggatgatatattcgaattcaaatgtgtggatttcggcgcctattttatagctatgcgattggataagaaaacatatctgccgcaagctattaggcgaggtactggagacgcgtggatggttaaaaaggcggcaaaggtcgatccatctgctcaacaattttgtcagtatttgataaaacacaagtctaataatgttattacttgtggtaatgagatgttaaatgaattaggttatagcggttattttatgtcaccgcattggtgttccgattttagtaatatggaatagtgttagataaatgcggtaacgaatgttcctgtaaggaaccataacagtttagatttaacgttaaagatgagcataaacataataaacaaaattacaatcaaacctataacattaatatcaaacaatccaaaaaatgaaatcagtggagtagtaaacgcgtacataactcctggataacgtttagtagctgccgttcctattctagaccaaaaattcggtttcatgttttcgaaacggtgttctgcaacaagtcggggatcgtgttctacatatttggcggcattatccagtatctgcctattgatcttcatttcgttttcaattctggctatttcaaaataaaatcccgatgatagacctccagactttataatttcatctacgatgttcagcgccgtagtaactctaataatataggctgataagctaacatcataccctcctgtatatgtgaatatggcatgatttttgtccattacaagctcggttttaactttattgcctgtaataatttctctcatctgtaggatatctatttttttgtcatgcattgccttcaagacgggacgaagaaacgtaatatcctcaataacgttatcgttttctacaataactacatattctacctttttattttctaactcggtaaaaaaattagaatcccatagggctaaatgtctagcgatatttcttttcgtttcctctgtacacatagtgttacaaaaccctgaaaagaagtgagtatacttgtcatcatttctaatgtttcctccagtccactgtataaacgcataatccttgtaatgatctggatcatccttgactaccacaacatttcttttttctggcataacttcgttgtcctttacatcatcgaacttctgatcattaatatgctcatgaacattaggaaatgtttctgatggaagtctatcaataactggcacaacaataacaggagttttcgccgccgccatttagttattgaaattaatcatatacaactctttaatacgagttatattttcgtctatccattgtttcacatttacatatttcgacaaaaagatataaaatgcgtattccaatgcttctctgtttaatgaattactaaaatatacaaacacgtcactgtctggcaataaatgatatcttagaatattgtaacaatttattttgtattgcacatgttcgtgatctatgagttcttcttcgaatggcataggatctccgaatctgaaaacgtataaataggagttagaataataatatttgagagtattggtaatatataaactctttagcggtataattagtttttttctctcaatttctatttttagatgtgatggaaaaatgactaattttgtagcattagtatcatgaactctaatcaaaatcttaatatcttcgtcacacgttagctctttgaagtttttaagagatgcatcagttggttcgaccgatggagtaggtgcaacaattttttgttcgatgtatgtatgtactggagccattgttttaactataatggtgcttgtatcgaaaaactttaatgcagatagcggaagctcttcgccgcgactttctacatcgtaattgggttctaacgccgatctctgaatggatactagttttctaagttctaatgtgattctctgaaaatgtaaatccaattcctccggcattatagatgtgtatacatcggtaaataaaactatagtatccaacgatcccttctcgcaaattctagtcttaaccaaaaaatcgtatataaccacggagatggcgtatttaagagtggattcttctaccgttttgttcttggatgtcatataggaaactataaagtccgcactactgttaagaatgattactaacgcaactatatagttcaaattaagcattttggaaacataaaataactctgtagacgatacttgactttcgaataagtttgcagacaaacgaagaaagaacagacctctcttaatttcagaagaaaactttttttcgtattcctgacgtctagagtttatatcaataagaaagttaagaattagtcggttaatgttgtatttcattacccaagtttgagatttcataatattatcaaaagacatgataatattaaagataaagcgctgactatgaacgaaatagctatatggttcgctcaaaaatatagtcttgttaaacgtggaaacgataactgtatttttaatcacgtcagcggcatctaaattaaatataggtatatttattccacacactctacaatatgccacaccatcttcataataaataaattcgttagcaaaattattaattttagtgaaatagttagcgtcaactttcatagcttccttcaatctaatttgatgctcacacggtgcgaattccactctaacatcccttttccatgcctcaggttcatcgatctctataatatctagttttttgcgtttcacaaacacaggctcgtctctcgcgatgagatctgtatagtaactatgtaaatgataactagatagaaagatgtagctatatagatgacgatcctttaagagaggtataataactttaccccaatcagatagactgttgttatggtcttcggaaaaagaatttttataaatttttccagtattttccaaatatacgtacttaacatctaaaaaatccttaatgataataggaatggataatccgtctattttataaagaaatacatatcgcacattatacttttttttggaaatgggaataccgatgtgtctacataaatatgcaaagtctaaatattttttagagaatcttaattggtccaaattcttttccaagtacggtaatagatttttcatattgaacggtatcttcttaatctctggttctagttccgcattaaatgatgaaactaagtcactatttttataactaacgattacatcacctctaacatcatcatttaccagaatactgatcttcttttgtcgtaaatacatgtctaatgtgttaaaaaaaagatcatacaagttatacgtcatttcatctgtggtattcttgtcattgaaggataaactcgtactaatctcttctttaacagcctgttcaaatttatatcctatatacgaaaaaatagcaaccagtgtttgatcatccgcgtcaatattctgttctatcgtagtgtataacaatcgtatatcttcttctgtgatagtcgatacgttataaaggttgataacgaaaatatttttatttcgtgaaataaagtcatcgtaggattttggacttatattcgcgtctagtagatatgcttttatttttggaatgatctcaattagaatagtctctttagagtccatttaaagttacaaacaactaggaaattggtttatgatgtataatttttttagtttttatagattctttattctatacttaaaaaatgaaaataaatacaaaggttcttgagggttgtgttaaattgaaagcgagaaataatcataaattatttcattatcgcgatatccgttaagtttgtatcgtaatggcgtggtcaattacaaataaagcggatactagtagcttcacaaagatggctgaaatcagagctcatctaaaaaatagcgctgaaaataaagataaaaacgaggatattttcccggaagatgtaataattccatctactaagcccaaaaccaaacgagccactactcctcgtaaaccagcggctactaaaagatcaaccaaaaaggaggaagtggaagaagaagtagttatagaggaatatcatcaaacaactgaaaaaaattctccatctcctggagtcagcgacattgtagaaagcgtggccgctgtagagctcgatgatagcgacggggatgatgaacctatggtacaagttgaagctggtaaagtaaatcatagtgctagaagcgatctctctgacctaaaggtggctaccgacaatatcgttaaagatcttaagaaaattattactagaatctctgcagtatcgacggttctagaggatgttcaagcagctggtatctctagacaatttacttctatgactaaagctattacaacactatctgatctagtcaccgagggaaaatctaaagttgttcgtaaaaaagttaaaacttgtaagaagtaaatgcgtgcacttttttataaagatggtaaactctttaccgataataattttttaaatcctgtatcagacgataatccagcgtatgaggttttgcaacatgttaaaattcctactcatttaacagatgtagtagtatatgaacaaacgtgggaggaggcgttaactagattaatttttgtgggaagtgattcaaaaggacgtagacaatacttttacggaaaaatgcatgtacagaatcgcaacgctaaaagagatcgtatttttgttagagtatataacgttatgaaacgaattaattgttttataaacaaaaatataaagaaatcgtccacagattccaattatcagttggcggtttttatgttaatggaaactatgttttttattagatttggtaaaatgaaatatcttaaggagaatgaaacagtagggttattaacactaaaaaataaacacatagaaataagtcccgatgaaatagttatcaagtttgtaggaaaggacaaagtttcacatgaatttgttgttcataagtctaatagactatataagccgctattgaaactgacggatgattctagtcccgaagaatttctgttcaacaaactaagtgaacgaaaggtatatgaatgtatcaaacagtttggtattagaatcaaggatctccgaacgtatggagtcaattatacgtttttatataatttttggacaaatgtaaagtccatatctcctcttccatcaccaaaaaagttaatagcgttaactatcaaacaaactgctgaagtggtaggtcatactccatcaatttcaaaaagagcttatatggcaacgactattttagaaatggtaaaggataaaaattttttagatgtagtatctaaaactacgttcgatgaattcctatctatagtcgtagatcacgttaaatcatctacggatggatgatatagatctttacacaaataattacaaaaccgataaatggaaatggataagcgtatgaaatctctcgcaatgaccgctttctttggggagctaagcacattagatattatggcattgataatgtctatatttaaacgccatccaaacaataccattttttcagtggataaggatggtcagtttatgattgatttcgaatacgataattataaggcttctcaatatttggatctgaccctcactccgatatctggagatgaatgcaagactcacgcatcgagtatagccgaacaattggcgtgtgtggatattattaaagaggatattagcgaatatatcaaaactactccccgtcttaaacgatttataaaaaaataccgcaatagatcagatactcgcatcagtcgagatacagaaaagcttaaaatagctctagctaaaggcatagattacgaatatataaaagacgcttgttaataagtaaatgaaaaaaaactagtcgtttataataaaacacgatatggatgccaacgtagtatcatcttctactattgcgacgtatatagacgctttagcgaagaatgcttcggaattagaacagaggtctaccgcatacgaaataaataatgaattggaactagtatttattaagccgccattgattactttgacaaatgtagtgaatatctctacgattcaggaatcgtttattcgatttaccgttactaataaggaaggtgttaaaattagaactaagattccattatctaaggtacatggtctagatgtaaaaaatgtacagttagtagatgctatagataacatagtttgggaaaagaaatcattagtgacggaaaatcgtcttcacaaagaatgcttgttgagactatcgacagaggaacgtcatatatttttggattacaagaaatatggatcctctatccgactagaattagtcaatcttattcaagcaaaaacaaaaaactttacgatagactttaagctaaaatattttctaggatccggtgcccagtctaaaagttctttattacacgctattaatcatccaaagtcaaggcctaatacatctctggaaatagaatttacacctagagacaatgaaacagttccatatgatgaactaataaaggaattgacgactctctcgcgtcatatatttatggcttctccagagaatgtaattctttctccgcctattaacgcgcctataaaaacctttatgttgcctaaacaagatatagtaggtttggatctggaaaatctatatgccgtaactaagactgacggcattcctataactatcagagttacatcaaacgggttgtattgttattttacacatcttggttatattattagatatcctgttaagagaataatagattccgaagtagtagtctttggtgaggcagttaaggataagaactggaccgtatatctcattaagctaatagagcctgtgaatgcaatcaatgatagactagaagaaagtaagtatgttgaatctaaactagtggatatttgtgatcggatagtattcaagtcaaagaaatacgaaggtccgtttactacaactagtgaagtcgtcgatatgttatctacatatttaccaaagcaaccagaaggtgttattctgttctattcaaagggacctaaatctaacattgattttaaaattaaaaaggaaaatactatagaccaaactgcaaatgtagtatttaggtacatgtccagtgaaccaattatctttggagagtcgtctatctttgtagagtataagaaatttagcaacgataaaggctttcctaaagaatatggttctggtaagattgtgttatataacggcgttaattatctaaataatatctattgtttggaatatattaatacacataatgaagtgggtattaagtccgtggttgtacctattaagtttatagcagaattcttagttaatggagaaatacttaaacctagaattgataaaaccatgaaatatattaactcagaagattattatggaaatcaacataatatcatagtcgaacatttaagagatcaaagcatcaaaataggagatatctttaacgaggataaactatcggatgtgggacatcaatacgccaataatgataaatttagattaaatccagaagttagttattttacgaataaacgaactagaggaccgttgggaattttatcaaactacgtcaagactcttcttatttctatgtattgttccaaaacatttttagacgattccaacaaacgaaaggtattggcgattgattttggaaacggtgctgacctggaaaaatacttttatggagagattgcgttattggtagcgacggatccggatgctgatgctatagctagaggaaatgaaagatacaacaaattaaactctggaattaaaaccaagtactacaaatttgactacattcaggaaactattcgatccgatacatttgtctctagtgtcagagaagtattctattttggaaagtttaatatcatcgactggcagtttgctatccattattcttttcatccgagacattatgctaccgtcatgaataacttatccgaactaactgcttctggaggcaaggtattaatcactaccatggacggagacaaattatcaaaattaacagataaaaagacttttataattcataagaatttacctagtagcgaaaactatatgtctgtagaaaaaatagctgatgatagaatagtggtatataatccatcaacaatgtctactccaatgactgaatacattatcaaaaagaacgatatagtcagagtgtttaacgaatacggatttgttcttgtagataacgttgatttcgctacaattatagaacgaagtaaaaagtttattaatggcgcatctacaatggaagatagaccatctacaagaaactttttcgaactaaatagaggagccattaaatgtgaaggtttagatgtcgaagacttacttagttactatgttgtttatgtcttttctaagcggtaaataataatatggtatgggttctgatctcccagttctaaatgcattaaataattccaatagagcgatttttgttcctataggaccttccaactgtggatactctgtattgttaatagatatattaatacttttgtcgggtaacagaggttctacgtcttttaaaaataaaagtttgataacatctggcctgttcataaataaaaacttggcgattctatatatactcttattatcaaatctagccattgtcttatagatgtgagctactgtaggtgtaccatttgattttctttctaatactatatatttctctcgaagaagttcttgcacatcatctgggaataaaatactactgttgagtaaatcagttattttttttatatcgatattgatggacatttttatagttaaggataataagtatcccaaagtagataacgacgataacgaagtatttatacttttaggaaatcacaatgactttatcagattaaaattaacaaaattaaaggagcatgtatttttttctgaatatattgtgactccagatacatatggatctttatgcgtcgaattaaatgggtctagttttcagcacggcggtagatatatagaggtggaggaatttatagatgctggaagacaagttagatggtgttctacatccaatcatatatctaaagatatacccgaagatatgcacactgataaatttgtcatttatgatatatacacttttgacgctttcaagaataaacgattggtattcgtacaggtacctccgtcgttaggagatgatagtcatttgactaatccgttattgtctccgtattatcgtaattcagtagccagacaaatggtcaatgatatgatttttaatcaagattcatttttaaaatatttattagaacatctgattagaagccactatagagtttctaaacatataacaatagttagatacaaggataccgaagaattaaatctaacgagaatatgttataatagagataagtttaaggcgtttgtattcgcttggtttaacggcgtttcggaaaatgaaaaggtactagatacgtataaaaaggtatctaatttgatataatgaattcagtgactgtatcacacgcgccatatactattacttatcacgatgattgggaaccagtaatgagtcaattggtagagttttataacgaagtagccagttggctgctacgagacgagacgtcgcctattcctgataagttctttatacagttgaaacaaccgcttagaaataaacgagtatgtgtgtgcggtatagatccgtatccgaaagatggaactggtgtaccgttcgaatcaccaaattttacaaaaaaatcaattaaggagatagcttcatctatatctagattaaccggagtaattgattataaaggttataaccttaatataatagacggggttataccctggaattattacttaagttgtaaattaggagaaacaaaaagtcacgcgatctactgggataagatttccaagttactgctgcagcatataactaaacacgttagtgttctttattgtttgggtaaaacagatttctcgaatatacgggccaagttagaatccccggtaactaccatagtcggatatcatccagcggctagagaccgccaattcgagaaagatagatcatttgaaattatcaacgttttactggaattagacaacaaggcacctataaattgggctcaagggtttatttattaatgctttagtgaaattttaacttgtgttctaaatggatgcggctattagaggtaatgatgttatctttgttcttaagactataggtgtcccgtcagcgtgcagacaaaatgaagatccaagatttgtagaagcatttaaatgcgacgagttagaaagatatattgagaataatccagaatgtacactattcgaaagtcttagggatgaggaagcatactctatagtcagaattttcatggatgtagatttagacgcgtgtctagacgaaatagattatttaacggctattcaagattttattatcgaggtgtcaaactgtgtagctagattcgcgtttacagaatgcggcgccattcatgaaaatgtaataaaatccatgagatctaatttttcattgactaagtctacaaatagagataaaacaagttttcatattatctttttagacacgtataccactatggatacattgatagctatgaaacgaacactattagaattaagtagatcatctgaaaatccactaacaagatcgatagacactgccgtatataggagaaaaacaactcttcgggttgtaggtactaggaaaaatccaaattgcgacactattcatgtaatgcaaccaccgcatgataatatagaagattacctattcacttacgtggatatgaacaacaatagttattacttttctctacaacaacgattggaggatttagttcctgataagttatgggaaccagggtttatttcattcgaagacgctataaaaagagtttcaaaaatattcattaattctataataaactttaatgatctcgatgaaaataattttacaacggtaccactggtcatagattacgtaacaccttgtgcattatgtaaaaaacgatcgcataaacatccgcatcaactatcgttggaaaatggtgctattagaatttacaaaactggtaatccacatagttgtaaagttaaaattgttccgttggatggtaataaactgtttaatattgcacaaagaattttagacactaactctgttttattaaccgaacgaggagaccatatagtttggattaataattcatggaaatttaacagcgaagaacccttgataacaaaactaattttgtcaataagacatcaactacctaaggaatattcaagcgaattactctgtccaagaaaacgaaagactgtagaagctaacatacgagacatgttagtagattcagtagagaccgatacctatccggataaacttccgtttaaaaatggtgtattggacctggtagacggaatgttttactctggagatgatgctaaaaaatatacgtgtactgtatcaaccggatttaaatttgacgatacaaagttcgtcgaagacagtccagaaatggaagagttaatgaatatcattaacgatatccaaccattaacggatgaaaataagaaaaatagagagctatatgaaaaaacattatctagttgtttatgcggtgctaccaaaggatgtttaacattcttttttggagaaactgcaactggaaagtcgacaaccaaacgtttgttaaagtctgctatcggtgacctgtttgttgagacgggtcaaacaattttaacagatgtattggataaaggacctaatccatttatcgctaacatgcatttgaaaagatctgtattctgtagcgaactacctgattttgcctgtagtggatcaaagaaaattagatctgacaatattaaaaagttgacagaaccttgtgtcattggaagaccgtgtttctccaataaaattaataatagaaaccatgcgacaatcattatcgatactaattacaaacctgtttttgataggatagataacgcattaatgagaagaattgccgtcgtgcgattcagaacacacttttctcaaccttctggtagagaggctgctgaaaataatgacgcgtacgataaagtcaaactattagacgaggggttagatggtaaaatacaaaataatagatatagattcgcatttctatacttgttggtgaaatggtacagaaaatatcatgttcctattatgaaactatatcctacacccgaagagattcctgactttgcattctatctcaaaataggtactctgttagtatctagctctgtaaagcatattccattaatgacggacctctccaaaaagggatatatattgtacgataatgtggtcactcttccgttgactactttccaacagaaaatatccaagtattttaattctagactatttggacacgatatagagagcttcatcaatagacataagaaatttgccaatgttagtgatgaatatctgcaatatatattcatagaggatatttcatctccgtaaatatatgctcatatatttatagaagatatcacatatctaaatgaataccggaatcatagatttatttgataatcatgttgatagtataccaactatattacctcatcagttagctactctagattatctagttagaactatcatagatgagaacagaagcgtgttattgttccatattatgggatcaggtaaaacaataatcgctttgttgttcgccttggtagcttccagatttaaaaaggtttacattctagtgcctaatatcaacattttgaaaatttttaattataatatgggtgtagctatgaacttgtttaatgacgaattcatagctgagaatatctttattcattccacaacaagtttttattctcttaattataacgataacgtcattaattataacggattatctcgctacaataactctatttttatcgttgatgaggcacataatatctttgggaataatactggagaacttatgaccgtgataaaaaataaaaacaagattccttttctactattgtctggatctcccattactaacacacctaatactctgggtcatattatagatttaatgtccgaagagacgatagattttggtgagattattagtcgtggtaagaaagtaattcagacacttcttaacgaacgcggtgtgaatgtacttaaggatttgcttaaaggaagaatatcatattacgaaatgcctgataaagatctaccaacgataagatatcacggacgtaagtttctagatactagagtagtatattgtcacatgtctaaacttcaagagagagattatatgattactagacgacagctatgttatcatgaaatgtttgataaaaatatgtataacgtgtcaatggcagtattgggacaacttaatctgatgaataatttagatactttatttcaggaacaggataaggaattgtacccaaatctgaaaataaataatggcgtgttatacggagaagaattggtaacgttaaacattagttccaaatttaaatactttattaatcggatacagacactcaacggaaaacattttatatacttttctaattctacatatggcggattggtaattaaatatatcatgctcagtaatggatattctgaatataatggttctcagggaactaatccacatatgataaacggcaaaccaaaaacatttgctatcgttactagtaaaatgaaatcgtctttagaggatctattagatgtgtataattctcctgaaaacgatgatggtagtcaattgatgtttttgttttcgtcaaacattatgtccgaatcctatactctgaaagaggtaaggcatatttggtttatgactatcccagatactttttctcaatacaaccaaattcttggacgatctattagaaaattctcttacgccgatatttctgaaccagttaatgtatatcttttagccgccgtatattccgatttcaatgacgaagtaacgtcattaaacgattacacacaggatgaattgattaatgttttaccatttgacatcaaaaagctgttatatctaaaatttaagactaaagaaacgaatagaatatactctattcttcaagagatgtctgaaacgtattctcttccaccacatccatcaattgtaaaagttttattgggagaattggtcagacaatttttttataataattctcgtattaagtataacgactccaagttacttaaaatggttacatcagttataaaaaataaagaagacgctaggaattacatagatgatattgtaaacggtcacttctttgtatcgaataaagtatttgataaatctcttttatacaaatacgaaaacgatattattacagtaccgtttagactttcctacgaaccatttgtttggggagttaactttcgtaaagaatataacgtggtatcttctccataaaactgatgaaatatataaagaaataaatgtcgagctttgttaccaatggataccttccagttacattggaaccacacgagctgacgttagacataaaaactaatattaggaatgccgtatataagacgtatctccatagagaaattagtggtaaaatggccaagaaaatagaaattcgtgaagacgtggaattacctctcggcgaaatagttaataattctgtagttataaacgttccgtgtgtaataacctacgcgtattatcacgttggggatatagtcagaggaacattaaacatcgaagatgaatcaaatgtaactattcaatgtggagatttaatctgtaaactaagtagagattcgggtactgtatcatttagcgattcaaagtactgcttttttcgaaatggtaatgcgtatgacaatggcagcgaagtcactgccgttctaatggaggctcaacaaggtatcgaatctagttttgtttttctcgcgaatatcgtcgactcataaaaaagagaatagcggtaagtataaacacgaatactatggcaataattgcgaatgttttattctcttcgatatatttttgataatatgaaaaacatgtctctctcaaatcggacaaccatctcataaaatagttctcgcgcgctggagaggtagttgctgctcgtataatctccccagaataatatacttgcgtgtcgtcgttcaatttatacggatttctatagttctctgttatataatgcggttttccatcatgattagacgacgacaatagtgttctgaatttagatagttgatcagaatgaatgtttattggcgttggaaaaattatccatacagcgtctgcagagtggttgatagttgttcctagatatgtaaaataatccaacttactaggcagcaaattgtctagataaaatactgaatcaaacggtgcagacgtattggcggatctaatggaatccaattgattaactatcttttgaaaatatacatttttatgatccaatacttgtaagaatatagaaataatgataagtccatcatcgtgtttttttgcctcttcataagaactatattttttcttattccaatgaacaagattaatctctccagagtatttgtacacatctatcaagtgattggatccataatcgtcttcctttccccaatatatatgtagtgatgataacacatattcattggggagaaaccctccacttatatatcctcctttaaaattaatccttactagttttccagtgttctggatagtggttggtttcgactcattataatgtatgtctaacggcttcaatcgcgcgttagaaattgcttttttagtttctatattaataggagatagttgttgcggcatagtaaaaatgaaatgataactgtttaaaaatagctcttagtatgggaattacaatggatgaggaagtgatatttgaaactcctagagaattaatatctattaaacgaataaaagatattccaagatcaaaagacacgcacgtgtttgctgcgtgtataacaagtgacggatatccgttaataggagctagaagaacttcattcgcgttccaggcgatattatctcaacaaaattcagattctatctttagagtatccactaaactattacggtttatgtactacaatgaactaagagaaatctttagacggttgagaaaaggttctatcaacaatatcgatcctcactttgaagagttaatattattgggtggtaaactagataaaaaggaatctattaaagattgtttaagaagagaattaaaagaggaaagtgatgaacgtataacagtaaaagaattcggaaatgtaattctaaaacttacaacgcgcgataaattatttaataaagtatatataggttattgcatggcgtgttttattaatcaatcgttggaggatttatcgcatactagtatttacaatgtagaaattagaaagattaaatcattaaatgattgtattaacgacgataaatacgaatatctgtcttatatttataatatgctagttaatagtaaatgaacttttacagatctagtataattagtcagattattaagtataatagacgactagctaagtctattatttgcgaggatgactctcaaattattacactcacggcattcgttaaccaatgcctatggtgtcataaacgagtatccgtgtccgctattttattaactactgataacaaaatattagtatgtaacagacgagatagttttctctattctgaaataattagaactagaaacatgtttagaaagaaacgattatttctgaattattccaattatttgaacaaacaggaaagaagtatactatcgtcatttttttctctagatccagctactgctgataatgatagaatagacgctatttatccgggtggcatacccaaaaggggtgagaatgttccagagtgtttatccagggaaattaaagaagaagttaatatagacaattcttttgtattcatagacactcggttttttattcatggcatcatagaagataccattattaataaattttttgaggtaatcttctttgtcggaagaatatctctaacgagtgatcaaatcattgatacatttaaaagtaatcatgaaatcaaggatctaatatttttagatccgaattcaggtaatggactccaatacgaaattgcaaaatatgctctagatactgcaaaactcaaatgttatggccatagaggatgttattacgaatcattaaaaaaattaactgaggatgattgattagaaaatataaattaatttaccatcgtgtatttttataacgggattgtccggcatatcatgtagatagttaccgtctacatcgtatactcgaccatctacgcctttaaatcctctatttattgacattaatctattagaattggaataccaaatattagtaccctcaattagtttattggtaatatttttgttagacgatagatcgatggctcttgaaaccaaggttttccaaccggactcattgtcgatcggtgagaagtctttttcattagcatgaatccattctaatgatgtatgtttaaacactctaaacaattggacaaattcttttgatttgctttgaatgatttcaaataggtcttcgtctacagtaggcataccattagataatctagccattataaagtgcacgtttacatatctacgttctggaggagtaagaacgtgactattgagacgaatggctcttcctactatctgacgaagagacgcctcgttccatgtcatatctaaaatgaagatatcattgattgagaagaagctaataccctcgcctccactagaagagaatacgcatgttttaatgcattctccgttagtgtttgattcttggttaaactcagccaccgccttgattctagtatcttttgttctagatgagaactctatattagagataccaaagactttgaaatatagtaataagatttctattcctgactgattaacaaatggttcaaagactagacatttaccatgggatgctaatattcccaaacatacatctataaatttgacgcttttctcttttaattcagtaaatagagagatatcagccgcactagcatcccctcccaatagttctccccttttaaaggtatctaatgcagatttagaaaattctctatctcttaatgaatttttaaaatcattatatagtgttgctatctcttgcgcgtattcgcccggatcacgattttgtctttcaggaaagctatcgaacgtaaacgtagtagccatacgtctcagaattctaaatgatgatatacctgtttttatttcagcgagtttagccttttgataaatttcttcttgctttttcgacatattaacgtatcgcattaatactgttttcttagcgaatgatgcagacccttctacgtcatcaaaaatagaaaactcgttattaactatgtacgaacataggcctcctagtttggagactaattctttttcatcaactagacgtttattctcaaatagcgattggtgttgtaaggatcctggtcgtagtaagttaaccaacatggtgaattcttgcacactattgacgataggtgtagccgataaacaaatcatcttatggttttttaatgcgatggtcttagataaaaaattatatactgaacgagtaggacggatcttaccatcttctttgattaatgatttagaaatgaagttatgacattcatcaataatgacgcatattctactcttggaattaatagttttgatattagtaaaaaatttatttctaaaattttgatcatcgtaattaataaaaatacaatccttcgttatctctggagcgtatctgagtatagtgttcatccaaggatcttctatcaaagcctttttcaccaataagataatagcccaattcgtataaatatccttaagatgtttgagaatatatacagtagtcattgttttaccgacacccgtttcatggaacaataaaagagaatgcatactgtctaatcctaagaaaactcttgctacaaaatgttgataatccttgaggcgtactacgtccgaccccatcatttcaacaggcatattagtagttctgcgcaatgcataatcgatataggccgcgtgtgatttactcatttatgagtgataagtaataactatgttttaaaaatcacagcagtagtttaactagtcttctctgatgtttgttttcgatactttttgaatcagaagtcatactagaataaagcaacgagtgaacgtaatagagagcttcgtatactctattcgaaaactctaagaacttattaatgaattccgtatccactggattgtttaaaatactaaattgaacactgttcacatccttccaagaagaagacttagtgacggacttaacatgagacataaataaatccaaattttttttacaaacatcactagccaccataatggcgctatcttttaaccagctatcgcttacgcattttagcagtctaacatttttaaagagactacaatatattctcatagtatcgattacacctctaccgaataaagttggaagtttaataatacaatatttttcgtttacaaaatcaaataatggtcgaaacacgtcgaaggttaacatcttataatcgctaatgtatagattgttttcagtgagatgattattagatttaatagcatctcgttcacgtttgaacagtttattgcgtgcgctgaggtcggcaactacggcgtccgctttagtactcctcccataatactttacgctattaatctttaaaatttcatagactttatctagatcgctttctggtaacatgatatcatgtgtaaaaagttttaacatgtcggtcggcattctatttagatcattaactctagaaatctgaagaaagtaattagctccgtattccagactaggtaatgggcttttacctagagacagattaagttctggcaatgtttcataaaatggaagaaggacatgcgttccctcccggatattttttacaatttcatccatttacaactctatagtttgttttcattattattagttattatctcccataatcttggtaatacttaccccttgatcgtaagataccttatacaggtcattacatacaactaccaattgtttttgtacataatagattggatggttgacatccatggtggaataaactactcgaacagatagtttatctttccccctagatacattagccgtaatagttgtcggcctaaagaatatctttggtgtaaagttaaaagttagggttcttgttccattattgctttttgtcagtagttcattataaattctcgagatgggtccgttctctgaatatagaacatcatttccaaatctaacttctagtctagaaataatatcggtcttattcttaaaatctattcccttgatgaagggatcgttaatgaacaaatccttggcctttgattcggctgatctattatctccgttatagacgttacgttgactagtccaaagacttacaggaatagatgtatcgatgatgttgatactatgtgatatgtgagcaaagattgttctcttagtggcatcactatatgttccagtaatggcggaaaactttttagaaatgttatatataaaagaattttttcgtgttccaaacattagcagattagtatgaagataaacactcatattatcaggaacattatcaatttttacatacacatcagcatcttgaatagaaacgataccatcttctggaacctctacgatctcggcagactccggataaccagtcggtggaccatcgctaacaataactagatcatccaacaatctactcacatatgcatctatataatctttttcatcttgtgagtaccctggatacgaaataaatttattatccgtatttccataataaggtttagtataaacagagagcgatgttgccgcatgaacttcagttacagtcgccgttggttggtttatttgacctattactctcctaggtttctctataaatgatggtttaatttgtacattcttaaccatatatccaataaagctcaattcaggaacataaacaaattctttgttgaacgtttcaaagtcgaacgaagagtcacgaataacgatatcggatactggattgaaggttaccgttacggtaatttttgaatcggatagtttaagactgctgaatgtatcttccacatcaaacggagttttaatataaacgtatactgtagatggttctttaatagtgtcattaggagttaggccaatagaaatatcattaagttcactagaatatccagagtgtttcaaagcaattgtattattgatacaattattatataattcttcgccctcaatttcccaaataacaccgttacacgaagagatagatacgtgattaatacatttatatccaacatatggtacgtaaccgaatcttcccatacctttaacttctggaagttccaaactcagaaccaaatgattaagcgcagtaatatactgatccctaatttcgaagctagcgatagcctgattgtctggaccatcgtttgtcataactccggatagagaaatatattgcggcatatataaagttggaatttgactatcgactgcgaagacattagaccgtttaatagagtcatccccaccgatcaaagaattaatgatagtattattcattttctatttaaaatggaaaaagcttacaataaactccgtagagaaatatctataatttgtgagttttccttaaagtaacagcttccgtaaacgccgtctttatctcttagtaagtttattgtatttataaccttttccttatcttcatagaatactaaaggcaacaaagaaatttttggttcttctctaagagctacgtgagacttaaccatagacgccaacgaatccctacatattttagaacagaaatacccaacttcaccacccttgaatgtctcaatactaataggtttaaaaaccaaatcttgattacaaaaccaacacttatcaattacactatttgtcttaatagacacatctgccatagatttataatactttggtagtatacaagcgagtgcttcttctttagcgggcttaaagactgctttaggtgctgaaataaccacatctggaaggcttactcgcttagccatttaattacggaactatttttttatacttctaatgagcaagtagaaaacctctcatctacaaaaacatactcgtgtccataatcctctaccatagttacacgttttttagatctcatatgtgctaaaaagttttcccatactaattggttactattatttttcgtataatttttaacagtttgaggttttagatttttagttacagaagtgatatcgaatattttatccaaaaagaatgaataattaattgtcttagaaggagtgttttcttggcaaaagaataccaagtgcttaaatatttctactacttcattaatcttttctgtactcagattcagtttctcatcttttacttgattgattatttcaaagactaacttataatcctttttatttattctctcgttagccttaagaaaactagatacaaaatttgcatctacatcatccgtggatatttgatttttttccatgatatccaagagttccgagataatttctccagaacattgatgagacaataatctccgcaatacatttctcaaatgaataagtttattagacacatggaagtttgactttttttgtacctttgtacatttttgaaataccgactcgcaaaaaatacaatattcatatccttgttcagatactataccgttgtgtctacaaccgctacataatcgtagattcatgttaacactctacgtatctcgtcgtccaatattttatataaaaacattttatttctagacgttgccagaaaatcctgtaatatttttagttttttgggctgtgaataaagtatcgccctaatattgttaccgtcttccgccaatatagtagttaaattatccgcacatgcaaaagaacaccgcttaggcggattcagtacaatgttatatttttcgtaccaactcatttaaatatcataatctaaaatagttctgtaatatgtctagcgctaatatattgatcataatcctgtgcataaattaagatacaacaatgtctcgaaatcatcgacatggcttcttccatagttagaagatcgtcgtcaaagttagcaacgtgattcatcaacatttgctgttttgaggcagcaaatactgaaccgtcgccattcaaccattcataaaaaccatcgtctgaatccattgataatttcttgtactggtttttgagagctcgcatcaatctagcatttctagctcccggattgaaaacagaaagaggatcgtacatccagggtccattttctgtaaatagaatcgtataatgtcccttcaagaagatatcagacgatccacaatcaaagaattggtctccgagtttgtaacaaactgcggactttaacctatacatgataccgtttagcatgatttctggtgatacgtcaatcggagtatcatctattagagatctaaagccggtgtaacattctccaccaaacatattcttattctgacgtcgttctacataaaacatcattgctccattaacgataacaggggaatgaacagcactacccatcacattagttcccaatggatcaatgtgtgtaactccagaacatcttccatatcctatgttaggaggagcgaacaccactcttccactattgccatcgaatgccatagaataaatatccttggaattgatagaaatcggactgtcggatgttgtgatcatcttcataggattaacaactatgtatggtgccgcctgaagtttcatatcgtaactgatgccgtttataggtctagccacagaaaccaacgtaggtctaaatccaactatagacaaaatagaagccaatatctgttcctcatctgtcataacttgagagcatccagtatgaataatcttcattagatggggatctaccgcatcatcatcgttacaataaaaaattcccattctaatgttcataattgcttttctaatcatggtatgcatgtttgctctctgaatctctgtggaaattagatctgatacacctgtaatcactatcggattatcctccgtaagacgattaaccaacaacatataattataagactttacttttctaaattcataaagttgctggattaggctataggtgtctccatgtacatacgcgttctcgagcgcaggaagtttaataccgaatagtgccatcagaataggatgaatatagtaattagtttctggttttctataaataaaagacaaatcttgtgaactagacatatcggtaaaatgcatggattggaatcgtgtagtcgacagaagaatatgatgattagatggagagtatattttatctaactctttgagttggtcaccgattctaggactagctcgagaatgaataagtactaaaggatgagtacatttcacagaaacactagcattgttcaatgtgctctttacatgggtaaggagttgaaatagctcgtttctatttgttctgacaatatttagtttattcataatgttaagcatatcctgaatagtaaagttagatgtgtcatacttgttagtagttagatatttagcaattgcattcccatcatttctcaatctcgtactccaatcatgtgtagatgctacttcgtcgatggaaaccatacaatcctttttgataggctgttgagattgattatttcctgcacgtttaggtttggtacgttgatttctagcccctgcggatataaagtcatcgtctacaatttgggacaatgaattgcatacactacaagacaaagatttatcagaagtgtgaatatgatcttcatctaccaaagaaagagtttgattagtataactagattttagtcctgcgttagatgttaaaaaaacatcgctattgaccacggcttccattatttatattcgtagtttttactcgaaagcgtgattttaatatccaatcttattacttttggaatcgttcaaaacctttgactagttgtagaatttgatctattgccctacgcgtatactcccttgcatcatatacgttcgtcaccagatcgtttgtttcggcctgaagttggtgcatatctctttcaacattcgacatgagatccttaagggccatatcgtctagattttgttgagatgctgctcctggatttggattttgttgtgctgttgtacatactgtaccaccagtaggtgtaggagtacatacagtggccacaataggaggttgaggaggtgtaaccgttggagtagtacaagaaatatttccatccgattgttgtgtacatgtagttgttggtaacgtctgagaaggttgggtagatggcggtgtcgtcgtcttttgatctttattaaatttagagataatatcctgaacagcattgctcggcgtcaacgctggaaggagtgaactcgccggcgcatcagtatcttcagacagccaatcaaaaagattagacatatcagatgatgtattagtttgttgtcgtggttttggtgtaggaacagtactactaggtagaagaataggagccggtgtagctgttggaaccggctgtggagttatatgaatagttggttgtagcggttggataggctgtctgctggcgaccgtcatattatctctagctagttgttctcgcaactgtctttgataatacgactcttgagactttagtcctatttcaatcgcttcatcctttttcgtatccggatccttttcttcagaataatagattgacgactttggtgtagaggattctgccagcccctgtgagaacttgttaaagaagtccatttaaggctttaaaattgaattgcgattataagattaaatggcagacacagacgatattatcgactatgaatccgatgatctcaccgaatacgaggatgatgaagaagaggaagaagatggagagtcactagaaactagtgatatagatcccaaatcttcttataagattgtagaatcagcatccactcatatagaagatgcgcattccaatcttaaacatatagggaatcatatatctgctcttaaacgacgctatactagacgtataagtctatttgaaatagcgggtataatagcagaaagctataacttgcttcaacgaggaagattacctctagtttcagaattttctgacgaaacgatgaagcaaaatatgctacatgtaattatacaagagatagaggagggttcttgtcctatagtcatcgaaaagaacggagaattgttgtcggtaaacgattttgacaaagatggtctaaaattccatctagactatattatcaaaatttggaaacttcaaaaacgatattagaatttatacgaatatcgttctctaaatgtcacaatcaagtctcgcatgttcagcaatttattgtcgtactttatatcgtgttcattaacgatatcttgcaaaatagtaatgattctatcttccttcgatagatattcttcagagattattgtcttatattttttcttgttatccgatatgaatttgataagactttgaacattattgatacccgtctgtttaattttttctacagatattttagttttggcagattctatcgtatctgtcaatagacatccaacatcgacattcgacgtcaattgtctataaatcaacgtataaattttagaaataacattagcgaattgttgtgcattgatgtcgttattctgaaacagtatgattttaggtagcattttcttaacaaagagaacgtatttattgttactcagttgaacagatgatatatccagattactaacgcatctgattccgtataccaaactttcagaagaaatggtgtacaattgtttgtattcattcaatgtctctttttcagaaattagtttagagtcgaatactgcaataattttcaagagatagttttcatcagataagattttatttagtgtagatatgataaaactattgttttgttggagaacttgatacgccgcgttctctgtagtcgacgctctcaaatgggaaacaatctccattatttttttggaatcggatactatatcttcggtatcttgacgcagtctagtatacatagagttaagagagattagagtttgtacattaagcaacatgtctctaaatgtggctacaaacttttcctttttcacataatctagtttattatataccgatttcacaacggcaccagatttaaggaaccagaatgaaaaactctgataactacaatatttcatcatagttacgattttatcatcttctatagttggtgtaatagcgcatacctttttctccaagactggaaccaacgtcataaaaatgtttaaatcaaaatccatatcaacatctgatgcgctaagaccagtctcgcgttcaagattatctttactaatggtgacgaactcatcatatagaactctaagtttgtccattatttatttacagatttagttgtttaatttatttgtgctcttccagagttgggatagtatttttctaacgtcggtattatattattaggatctacgttcatatgtatcataatattaatcatccacgttttgataaatctatctttagcttctgaaataacgtatttaaacaaaggagaaaaatatttagctacggcatcagacgcaataacattttttgtaaatgtaacgtatttagacgacagatcttcgttaaaaagttttccatctatgtagaatccatcggttgttaacaccattcccgcgtcagattgaataggagtttgaatagtttgttttggaaatagatccttcaataacttatagttgggtgggaaaaaatcgattttatcactagactctttcttttttactatcattacctcatgaactatttcttgaatgagtatatgtattttctttcctatatcggacgcgttcattggaaaatataccatgtcgttaactataagaatatttttatcctcgtttacaaactgaataatatcagatgtagttcgtaaacgaactatatcatcaccagcacaacatctaactatatgatatccactagtttcctttagccgtttattatcttgttccatattagcagtcattccatcatttaagaaggcgtcaaagataatagggagaaatgacattttggattctgttacgactttaccaaaattaaggatatacggacttactatctttttctcaacgtcgatttgatgaacacacgatgaaaatgtgcttctatgagattgatcatgtagaaaacaacaagggatacaatatttccgcatatcatgaaatatattaagaaatcccaccttattatatttccccaaaggatccatgcatgtaaacattatgccgttatcattaataaagacttctttctcatcggatttgtaaaagttgttactgatttttttcattccaggatctagataattaataatgatgggttttctattcttattctttgtattttggcatatcctagaccagtaaacagtttccactttggtaaaatcagcagacttttgaacgctattaaacatggcattaatggcaataactaaaaatgtaaaatatttttctatgttaggaatatggtttttcactttaatagatatatggtttttggccaaaatgatagatatttttttatccgaggatagtaaaatattattagtcgccgtctctataaaaatgaagctagtctcgatatccaattttattctagaattgataggagtcgccaaatgtaccttatacgttatatctcccttgatgcgttccatttgtgtatctatatcggacacaagatctgtaaatagttttacgttattaatcatcacggtatcgccgtcgctagataacgctaatgtaccatccaagtcccaaatggagagatttaactgttcatcgtttagaataaaatgattaccggtcatattaataaagtgttcatcgtatctagataacaacgacttataattaatgtccaagtcttgaactcgctgaatgatcttttttaacccagttagttttagattggtacgaaatatattgttaaactttgattctacagtaatgtccaaatctagttgtggaaatacttccatcaacattgtttcaaacttgataatattattatctacatcttcatacgatccaaattccggaatagatgtatcacatgctcttgccacccagataaccaaaaagtcacacgctccaggatatacattgtataaaaagctatcgttttttagtagtgtttttttctgagtatatacgaagggattaaaaatagtattatcaacgtaactatattccaaattattcttatgagaatagataataatatcgtccttaatatctaacaaatttcctaaatatccctttaattgagtcattcgaagcgtcaatagaatatgtctcttaactatttccggctgttgtatatttaaatgacttcgtaaaaaataatatatgggcgacttctcatctatgtaatcatatggagtgagatatagggctcgttctacctcctgccccttacccacctgtaataccaattgcggacttactatatatcgcatatttatatcgtggggtaaagtgaaaatctactaccgatgatgtaagtcttacaatgttcgaaccagtaccagatcttaatttggaggcctccgtagaactaggggaggtaaatatagatcaaacaacacctatgataaaggaaaatagcggttttatatcccgtagtagacgtctattcgcccatagatctaaggatgatgagagaaaactagcactacgattctttttacaaagactttattttttagatcatagagagattcattatttgttcagatgcgttgacgctgtaaaagacgtcactattaccaaaaaaaataacattatcgtggcgccttatatagcacttttaactatcgcatcaaaaggatgcaaacttacagaaacaatgattgaagcattttttccagaactatataatgaacatagtaagaaatttaaattcaactctcaagtatccatcatccaagaaaaactcggataccagtttggaaactatcacgtttatgattttgaaccgtattactctacagtagctctggctattcgagatgaacattcatctggcatttttaatatccgtcaagagagttatctggtaagttcattatctgaaataacatatagattttatctaattaatctaaaatctgatcttgttcaatggagtgctagtacgggcgctgtaattaatcaaatggtaaatactgtattgattacagtgtatgaaaagttacaactggtcatagaaaatgattcacaatttacatgttcattggctgtggaatcaaaacttccaataaaattacttaaagatagaaatgaattatttacaaaattcattaacgagttaaaaaagaccagttcattcaagataagcaaacgcgataaggatacgctactaaaatattttacttaggactggagttagaatttatagacgactcatttcgtttatcattgttactattattactattactatcattattagtgttggcattattagtattcttcttgtcatcttgttcagaaatatacagcaatgctatacctaatactaaatacattatcatgctcgcaatggctctaacaacaacgaaccaaaatgaatttggtcgtagcttttgttcacaaaaatacataaagaaatgtctacataaatctatggcgccattggctacttgaaatagcgccagtcctcctacagattttaatatagctgtataacatgacatttattcatcatcaaaagagacagagtcaccatctgtcatatttagattttttttcatgtgttcaaagtatcctctactcatttcattataatagtttatcatacttagaattttaggacggatcaatgagtaagacttgactagatcgtcagtagtaatttgtgcatcgtctattctgcatccgcttcgtcgaataatgtatagcatcgctttgagattctccatagctatcaagtctttatacaatgacatggaaatatctgtgaatactttatacttctccaacatcgatgccttaacatcatcgcctactttagcattgaaaatacgttctattgtgtagatggatgtagcaagatttttaaacaacaatgccatcttacacgatgattgcctcaagtctccaatcttttgtttagaacgattagctacagagttcaacgcttggctgactagcatattattatctttagaaattgtattcttcaatgaggcgtttatcatatctgtgatttcgttagtcatattacagtctgactgggttgtaatgttatccaacatatcacctatggatacggtacacgtaccagcatttgtaataatcctatctaagatgttgtatggcattgcgcagaaaatatcttctcctgtaatatctccactctcgataaatctactcagattattcttaaatgccttattctctggagaaaagatatcagtgtccatcatttcattaatagtatacgcagaaaagataccacgagtatcaattctatccaagatacttatcggttccgagtcacagataatggtttcctctccttcgggagatcctgcatagaaatatctaggacaatagtttctatactgtctgtaactctgataatctctaaagtcactaactgataccatgaaattgagaagatcaaacgctgaagtaatcaatttttctgcctcgtttttactacaactagttttcatcaatgtagcgacgatgtattgtttagttactcttggtctaatactgatgatagagatattattgcttcccataatggatcttctagtagtcaccttaaagcccattgatgcgaatagcagatagataaagtcttggtatgactcctttctaatatagtacggactacctttgtcacccaactttatacccacataagccataacaacctctttaatagccgtttcatgaggtttatcagccatgagcctgagtagttggaagaatctcatgaatcccgtctcagaaagtcctatatgcatgatagatttatctttcctgggaaactctcgtatagtcatagatgaaatactcttcaaagtttctgaaataagattagtaacagtcttacctccgactactctgggtaacaaacatactctaataggtgttttctctgcggagataatatcagaaaggatagagcaataagtagtattattgtgattataaagaccgaatacataacaggtagaatttataaacatcatgtcctgaaggtttttagacttgtattcctcgtaatccataccgtcccaaaacatggatttggtaactttgatagccgtagatctttgttccttcgccaacaggttaaagaaattaataaagaatttgttgtttctatttatgtccacaaattgcacgtttggaagcgccacggttacattcactgcagcattttgaggatcgcgagtatgaagtacgatgttattgtttactggtatatctggaaagaaatctaccagtctaggaataagagattgatatcgcatagaaatagtaaagtttataatctcatcatcgaagagcattttgttaccattgtaataaatatccactctgtcatatgtataaatgaagtactgttcaaacatgatgagatgtttatatgttggcatagtagtgagatcgacgtttggtaatggcaatgtattaagattaactccataatgtctagcagcatctgcgatgttataagcgtcgtcaaagcggggtcgatcttgtattgttatatattgtctaacacctataagattatcaaaatcttgtctgcttaatacaccgttaacaatttttgccttgaattcttttattggtgcattaataacatccttatagaggatgttaaacaaataagtgttatcaaagttaagatctggatatttcttttctgctagaacatccattgagtcggagccatctggtttaatataaccaccgataaatctagctctgtattctgtatccgtcaatctaatattaagaaggtgttgagtgaaaggtggaagatcgtaaaagctgtgagtattaatgataggattagtttccgaactaatgttaattggggtattaataatatctatatttccagcgttaagtgtaacattaaacagttttaattcacgtgacgtggtatcaattaaataattaatgcccaatttggatatagcagcctgaagctcatcttgtttagttacggatcctaatgagttattaagcaatatatcgaacggatgaacgaaggttgttttaagttggtcacatactttgtaatctagacatagatgcggaagaacggtagaaactatacgaaataaatattcagagtcctctaattgatcaagagtaactattgacttaataggcatcatttatttagtattaaatgacgaccgtaccagtgacggatatacaaaacgatttaattacagagttttcagaagataattatccatctaacaaaaattatgaaataactcttcgtcaaatgtctattctaactcacgttaacaacgtggtagatagagaacataatgccgccgtagtgtcatctccagaggaaatatcctcacaacttaatgaagatctatttccagatgatgattcaccggccactattatcgaacgagtacaacctcatactactattattgacgatactccacctcctacttttcgtagagagttattgatatcggaacaacgtcaacaacgagaaaaaagatttaatattacagtatcgaaaaatgctgaagcaataatggaatctagatctatgataacttctatgccaacacaaacaccatccttgggagtagtttatgataaagataaaagaattcagatgttggaggatgaagtggttaatcttagaaatcaacgatctaatacaaaatcatctgataatttagataattttaccaaaatactatttggtaagactccgtataaatcaacagaagttaataagcgtatagccatcgttaattatgcaaatttgaacgggtctcccttatcagtcgaggacttggatgtttgttcagaggatgaaatagatagaatctataaaacgattaaacaatatcacgaaagtagaaaacaaaaaattatcgtcactaacgtgattattattgtcataaacattatcgagcaagcattgctaaaactcggatttgaagaaatcaaaggactgagtaccgatatcacttcagaaattatcgatgtggagatcggagatgactgcgatgctgtagcatcaaaactaggaatcggtaacagtccggttcttaatattgtattgtttatactcaagatattcgttaaacgaattaaaattatttaatttaatacattcccatatccagacaacaatcgtctggattaatctgttcctgtcgtctcataccggacgacatattaatctttttattagtaggcatctttttagatggtttctttttcccagcattaactgagtcgatacctagaagatcgtgattgatctctccgaccattccacgaacttctaattggccgtctctaacggtaccataaactattttaccagcattagtaacagcttggacaatctgaccatccatcgcattgtacgatgtagtagtaactgttgttctacgtctaggagcaccagaagtatttttggagcccttggaggctgatgtagaagaagacgaggattttgattttggtttacatgtaatacattttgaactctttgattttgtatcacatgcgccggcagtcacatctgtttgagaattaagattattgttgcctcctttgacggctgcatctccaccgatttgcgctagtagatttttaagctgtggtgtaatcttattaactgtttcgatataatcatcgtaactgcttctaacggctaaattttttttatccgccatttagaagctaaaaatatttttatttatacagaagatttaactagattatacaatgaactaatatgatccttttccagattatttacaaacttggtattttttggttctggaggaggcgaatttaaattcggacttggattcggattttgtgagttcttgatcttattatacatcgagtataggatggcgacggtaactgctacacaaataccgatcaacaaaagaataccaatcatttattgacaataacttcactattgatcaagtatgcaatatatcatcttttcactaaataagtagtaataatgattcaacaatgtcgagatatatggacgataataatttagttcatggaaatatcgctatgattggtatgaatgactccgctaactctgtggggcgcgcagtgctttccccacatagaataaattagcattccgactgtgataataataccaagtataaacgccataatactcaatactttccatgtacgagtgggactggtagacttactaaagtcaataaaggcgaagatacacgaaagaatcaaaagaatgattccagcgattagcacgccggaaaaataatttccaatcataagcatcatgtccatttaactaataaaaattttaaatcgccgaatgaacaaagtggaatataaaccatataaaaacaatagtttgtactgcaaaaataatatctatttttgttttcgaagatatggtaaaattaaatagtagtacacagcatgttataactaacagcagcaacggctcgtaattacttatcatttactagacgaaaaggtggtgggatattttcttgctcaaataatacgaatatatcacccatccattttatgcgatgtttatatactctaatctttaatagatctatagacgacgggtttaccaacaatatagattttatcgattcatctaatttaaacccttccttaaacgtgaatgatctattatctggcataacgatgaccctacctgatgaatcggacaatgtactgggccatgtagaataaattatcaacgaattatcgtctacgaacatttatatcatttgttttaattttaggacgcgaataaatagatataaaatagaaaataacagatattacaaccagtgttatggccgcgcccaaccaggtaggcagttttattttatcttttactacaggttctcctggatgtacgtcaccaacggcggacgtagttctagtacaattagacgtaagttccgcttgggaattttttaacgctaaagagttaacgttaatcgtgcacccaacgtatttacatctagttctttgaacatcttgattataatataaccattttctatctctagattcgtcggtgcactcatgtaaccaacataccctaggtcctaaatatttatctccggaattagattttggataattcgcgcaccaacaatttctatttcctttatgatcgttacaaaagacgtataatgccgtatccccaaaagtaaaataatcaggacgaataattctaataaactcagaacaatatctcgcatccatatgtttggagcaaatatcggaataagtagacatagccggtttccgttttgcacgtaaccattctaaacaattggggtttccaggatcgtttctacaaaatccagtcatgaaatcgtcacaatgttctgtcttgtaattattattaaatatttttggacagtgtttggtatttgtcttagaacaacattttgccacgctatcactatcgcccaggagataatccttttttataaaatgacatcgttgcccggatgctatataatcagtagcgtgttttaaatccttaatatattcaggagttacctcgttctgataatagattaatgatccaggacgaaatttgaaagaactacatggttctccatgaattaatacatattgtttagcaaattcaggaactataaaactactacaatgatctatcgacataccatctatcaaacaaaacttgggtttaatttctcccggagatgtttcataatagtacgtataactttcttctgcaaacttaacagctctattatattcaggataattaaaacctaattccatatatttgtctcgtatatctgctattcctggtgctattttgattctattaagagtaacagctgcccccattcttaataatcgtcagtatttaaactgttaaatgttggtatatcaacatctaccttatttcccgcagtataaggtttgttgcaggtatactgttcaggaatggttacatttatacttcttctatagtcctgtctttcgatgttcatcacatatgcaaagaacagaataaacaaaataatgtaagaaataatattaaatatctgtgaattcgtaaatacattgattgccataataattacagcagctacaatacacacaatagacattcccacagtgttgccattacctccacgatacatttgagttactaagcaataggtaataactaagctagtaagaggcaatagaaaagatgagataaatatcatcaatatagagattagaggagggctatatagagccaagacgaacaaaatcaaaccgagtaacgttctaacatcattatttttgaagattcccaaataatcattcattcctccataatcgttttgcatcatacctccatctttaggcataaacgattgctgctgttcctctgtaaataaatctttatcaagcactccagcacccgcagagaagtcgtcaagcatattgtaatatcttaaataactcatttatatattaaaaaatgtcactattaaagatggagtataatctttatgccgaactaaaaaaaatgacttgtggtcaacccctaagtctttttaacgaagacggggatttcgtagaagttgaaccgggatcatcctttaagtttctgatacctaagggattttacgcctctccttccgtaaagacgagtctagtatttgaaacattaacaacgaccgataataaaatcactagtatcaatccaacaaatgcgccaaagttatatcctcttcaacgcaaagtcgtatctgaagtagtttctaatatgaggaaaatgatcgaatcaaaacgtcctctatacattactcttcacttggcgtgtggatttggtaagactattaccacgtgttatcttatggctacacacggtagaaaaaccgtcatttgcgtacccaataaaatgttaatacatcaatggaagacacaggtagaggcagtcggattggaacataagatatccatagatggagtaagtagtctattaaaggaactaaagactcaaagtccggatgtattaatagtagtcagtagacatctgacaaacgatgccttttgtaaatatatcaataagcattatgatttgttcatcttggatgaatcacatacgtataatctgatgaacaatacagcagttacaagatttttagcgtattatcctccgatgatgtgttattttttaactgctacacctagaccagctaaccgaatttattgtaacagtattattaatattgccaagttatccgatctaaaaaaaactatctatgcggtagatagtttttttgagccatattccacagacaatattagacatatggtaaaacgactagatggaccatctaataaatatcatatatataccgagaagttattatctgtagacgagcctagaaatcaacttattcttaataccctggtagaagaattcaagtcaggaactattaatcgcattttagttattactaaactacgtgaacatatggtattattctacaaacgattattagatcttttcggaccagaggttgtatttataggagacgcccaaaatagacgtactccagatatggtcaaatcaatcaaggaactaaatagatttatattcgtatccaccttattttattccggtactggtttagatattcctagtttggattcgttgttcatttgctcggcagtaatcaacaatatgcaaatagagcaattactagggagggtatgtcgagaaacagaactattagataggacggtatatgtatttcctaacacatccatcaaagaaataaagtacatgataggaaatttcatgcaacgaattattagtctgtctgtagataaactaggatttaaacaagaaagttatcggaaacatcaagaatccgatcccacttctgtatgtacaacatcctccagagaagaacgtgtattaaatagaatatttaactcgcaaaatcgttaagaagtttaagcgacgatccgcatgctgcgcaggccagtgtattacccctcatagtattaatataatccaatgatacttttgtgatgtcggaaatcttaaccaatttagactgacaggcagaacacgtcatgcaatcatcatcgtcatcgataactgtagtcttgggcttctttttgcggctcttcattccggaacgcacattggtgctatccatttaggtagtaaaaaataagtcagaatatgccctataacacgatcgtgcaaaacctggtatatcgtctctatctttatcacaatatagtgtatcgacatctttattattattgacctcgtttatcttggaacatggaatgggaacatttttgttatcaacggccacctttgccttaattccagatgttgtaaaattataactaaacagtctatcatcgacacaaatgaaattcttgtttagacgtttgtagtttacgtatgcggctcgttcgcgtctcattttttcagatattgcaggtactataatattaaaaataagaatgaaataacataggattaaaaataaagttatcatgacttctagcgctgatttaactaacttaaaagaattacttagtctgtacaaaagtttgaaattttcagattctgcggctatagaaaagtataattctttggtagaatggggaacatctacttactggaaaataggcgtgcaaaaggtagctaatgtcgagacgtcaatatctgattattatgatgaggtaaaaaataaaccgtttaatattgatccgggctattacattttcttaccggtatattttgggagcgtctttatttattcgaagggtaaaaatatggtagaacttggatctggaaactcttttcaaataccagatgatatgcgaagtgcgtgtaacaaagtattagacagcgataacggaatagactttctgagatttgttttgttaaacaatagatggataatggaagatgctatatcaaaatatcagtctccagttaatatatttaaactagctagtgagtacggattaaacatacccaaatatttagaaattgaaatagaggaagacacattatttgacgacgagttatactctattatagaacgctcttttgatgataaatttccaaaaatatccatatcgtatattaagttgggagaacttaggcggcaagttgtagactttttcaaattctcgttcatgtatattgagtccatcaaggtagatcgtataggagataatatttttattcctagcgttataacaaaatcaggaaaaaagatattagtaaaagatgtagaccatttaatacgatctaaggttagagaacatacatttgtaaaagtaaaaaagaaaaacacattttccattttatacgactatgatgggaacggaacagaaactagaggagaagtaataaaacgaattatagacactataggacgagactattatgttaacggaaagtatttctctaaggttggtagtgcaggcttaaagcaattgactaataaattagatattaatgagtgcgcaactgtcgatgagttagttgatgagattaataaatccggaactgtaaaacgaaaaataaaaaaccaatcagcatttgatttaagcagagaatgtttgggatatccagaagcagattttataacgttagttaataacatgcggttcaaaatagaaaattgtaaggttgtaaatttcaatattgaaaatactaattgtttaaataacccgagtattgaaactatatatggaaactttaaccagttcgtctcaatctttaatatcgtcaccgatgtcaaaaaaagattattcgagtgaaataatatgcgcctttgatataggtgcaaaaaatcctgccagaactgttttagaagtcaaggataactccgttagggtattggatatatcaaaattagactggagttctgattgggaaaggcgcatagctaaagatttgtcacaatatgaatacactacagttcttctagaacgtcagcctagaaggtcgccgtatgttaaatttatctattttattaaaggctttttatatcatacatcggctgccaaagttatttgcgtctcgcctgtcatgtctggtaattcatatagagatcgaaaaaagagatcggtcgaagcatttcttgattggatggacacattcggattgcgagactccgttccggatagacgcaaattagacgatgtagcggatagtttcaatttggctatgagatacgtattagataaatggaatactaattatacaccttataataggtgtaaatctagaaattacataaaaaaaatgtaataacgttagtaacgccattatggataatctatttacctttctacatgaaatagaagatagatatgccagaactatttttaactttcatctaataagttgcgatgaaataggagatatatatggtcttatgaaagaacgcatttcctcagaggatatgtttgataatatagtatataataaagatatacatcctgccattaagaaactagtgtattgcgacatccaacttactaaacacattattaatcagaatacgtatccggtatttaacgattcttcacaagtgaaatgttgtcattatttcgacataaactcagataatagcaatattagctctcgtacagtagagatatttgagagggaaaagtcatctcttgtatcatatattaaaactaccaataagaagagaaaggtcaattacggcgaaataaagaaaactgttcatggaggcactaatgcaaattacttttccggtaaaaagtctgacgagtatctgagtactacagttagatccaacattaatcaaccttggatcaaaaccatttctaagagaatgagagtagatatcattaatcactctatagtaacgcgtggaaaaagctctatattacaaactatagaaattatttttactaatagaacatgtgtgaaaatattcaaggattctactatgcacattattctatccaaggacaaggatgaaaaggggtgtatacacatgattgacaaattattctatgtctattataatttatttctgttgttcgaagatatcatccaaaacgagtactttaaagaagtagctaatgttgtaaaccacgtacttacggctacggcattagatgagaaattattcctaattaagaaaatggctgaacacgatgtttatggagttagcaatttcaaaatagggatgtttaacctgacatttattaagtcgttggatcataccgttttcccctctctgttagatgaggatagcaaaataaagttttttaaggggaaaaagctcaatattgtagcattacgatctctggaggattgtataaattacgtgactaaatccgagaatatgatagaaatgatgaaggaaagatcgactattttaaatagcatagatatagaaacggaatcggtagatcgtctaaaagaattgcttctaaaatgaaaaaaaacactgattcagaaatggatcaacgactagggtataagtttttggtgcctgatcctaaagccggagttttttatagaccgttacatttccaatatgtatcgtattctaattttatattgcatcgattgcatgaaatcttgaccgtcaagcggccactcttatcgtttaagaataatacagaacgaattatgatagaaattagcaatgttaaagtgactcctccagattactcacctataatcgcgagtattaaaggtaagagttatgatgcattagccacgttcactgtaaatatctttaaagaggtaatgaccaaagagggtatatccatcactaaaataagtagttatgagggaaaagattctcatttgataaaaattccgctactaataggatacgggaataaaaatccacttgatacagccaagtatcttgttcctaatgtcataggtggagtctttatcaataaacaatctgtcgaaaaagtaggaattaatctagtagaaaagattacaacatggccaaaatttagggttgttaagccaaactcattcactttctcgttttcctccgtatcccctcctaatgtattaccgacaagatatcgccattacaagatatctctggatatatcacaattggaagcgttgaatatatcatcgacaaagacatttataacggtcaatattgttttgctgtctcaatatttatctagagtgagtctagaattcattagacgtagtttatcatacgatatgcctccagaagttgtctatctagtaaacgcgataatagatagtgctaaacgaattactgaatctattactgactttaatattgatacatacattaatgacctggtggaagctgaacacattaaacaaaaatctcagttaacgatcaacgagttcaaatatgaaatgctgcataactttttacctcatatgaactatacacccgatcaactaaagggattttatatgatatctttactaagaaagtttctctactgtatctaccacacttctagatatccagatagagattcgatggtttgtcatcgcatcctaacgtacggcaaatattttgagacgttggcacatgatgaattagagaattacataggcaacatccgaaacgatatcatgaacaatcacaagaacagaggcacttacgcggtaaacattcatgtactaacaactcccggacttaatcacgcgttttctagcttattgagtggaaagttcaaaaagtcagacggtagttatcgaacacatcctcactattcatggatgcagaatatttctattcctaggagtgttggattttatccggatcaagtaaagatttcaaagatgttttctgtcagaaaataccatccaagtcaatatctttacttttgttcatcggacgttccggaaagaggtcctcaggtaggtttagtatctcaattgtctgtcttgagttccattacaaatatactaacgtctgagtatttggatttggaaaagaaaatttgtgagtatatcagatcatattataaagatgatataagttactttgaaacaggatttccaatcactatagaaaatgctctagtcgcatctcttaatccaaatatgatatgtgattttgtaactgactttagacgtagaaaacggatgggattcttcggtaacttggaggtaggtattactttagttagggatcacatgaatgaaattcgcattaatattggagcgggaagattagtcagaccattcttggttgtggataacggagagctcatgatggatgtgtgtccggagttagaaagcagattagacgacatgacattctctgacattcagaaagagtttccgcatgtcatcgaaatggtagatatagaacaatttacttttagtaacgtatgtgaatcggttcaaaaatttagaatgatgtcaaaggatgaaagaaagcaatacgatttatgtgactttcctgccgaatttagagatggatatgtggcatcttcattagtgggaatcaatcacaattctggacccagagctattcttggatgtgctcaagctaaacaagctatctcttgtctgagttcggatatacgaaataaaatagacaatggaattcatttgatgtatccagagaggccaatcgtgattagtaaggctttagaaacttcaaagattgcggctaattgcttcggccaacatgttactatagcattaatgtcgtacaaaggtatcaatcaagaggatggaattatcatcaaaaaacaatttattcagagaggcggtctcgatatagttaccgcaaagaaacatcaagtagaaattccgttggaaaactttaataacaaagaaagagataggtctaacgcctattcaaaattagaaagtaatggattagttagactgaatgctttcttggaatccggagacgctatggcacgaaatatctcatcaagaactcttgaagatgattttgctagagataatcagattagcttcgatgtttccgagaaatataccgatatgtacaaatctcgcgttgaacgagtacaagtagaacttactgacaaagttaaggtacgagtattaaccatgaaagaaagaagacccattctaggagataaatttaccactagaacgagtcaaaagggaacagtcgcgtatgtcgcggatgaaacggaacttccatacgacgaaaatggtatcacaccagatgtcattattaattctacatccatcttctctagaaaaactatatctatgttgatagaggttattttaacagccgcatattctgctaagccgtacaacaataagggagaaaaccgacctgtctgttttcctagtagtaacgaaacatccatcgatacatatatgcaattcgctaaacaatgttatgagcattcaaatccgaaattgtccgatgaagaattatcggataaaatcttttgtgaaaagattctctatgatcctgaaacggataagccttatgcatccaaagtattttttggaccaatttattacttgcgtctgaggcatttaactcaggacaaggcaaccgttagatgtagaggtaaaaagacgaagctcattagacaggcgaatgagggacgaaaacgtggaggaggtatcaagttcggagaaatggagagagactgtttaatagcgcatggcgcagccaatactattacagaagttttaaaagactcagaagaggattatcaagatgtgtatgtttgtgaaaattgtggagacatagcagcacaaatcaagggtattaatacatgtcttagatgttcaaaacttaatctctctcctctcttaacaaaaattgataccacgcacgtatctaaagtatttcttactcaaatgaacgccagaggcgtaaaagtcaaattagatttcgaacgaaggcctccttcgttttataaaccattagataaagttgatctcaagccgtcttttctggtgtaatattctagtttggtagtagatacatatcaatatcatcaaattcgagatccgaattataaaatgggcgtggattgttaactatagaatcggacgtctgatattcgaaaatctgtggagttttaggttttggtggaggtgtaactgctacttgggatactgaagtctgatattcagaaagctgggggatgttctggttcgacatccaccgatggtgtcacatcactaatcggttcggtaacgtctgtggatggaggtgctacttctacagaacctgtagcctcagttgtcaacggagatacatttttaatgcgaggaaatgtataatttggtaatggtttctcatgtggatctgaagaagaggtaagatatctactagaaagataccgatcacgttctagttctcttttgtagaacttaactttttctttctcagcatctagttgatattccaacctcttcacgttactacgttcagattccaattcacgttcgcatgggttacctccgcagtttttacgagcgatttcacgttcagccttcatgcgtctctccttctctctatcgagtttatcagagcagtctttctgaaggcgatcgaactccataaatttctccaacgctttgattgtttccatagatttccgaagttcagcttttaggactgtgattctttttctttcgaattcacagctggatgtgcaaccgtttccattaccgccatctctaagtttcttttctagatcggcaacatttcatccccatgccttttacattcctcgagtctactgtcgtcgaaatatcgttccagctccttttcgacatcaataactttagcacgttgtctctcaagctctcttttgtagttatctgattccctggcacgtttaagatcttcatgcaattgagtcagctcttaacacaatctcttgcttcttcgtcatagtacttacaatcactatgggatccattgttaccacgtctacactcggcgagctcgcgtttaagagattcaatttcccgtttgtattggtccatgtttccattgctaccaccattagatttacaggctgctagttgtcgttcgagatcagaaatacgggttttcttggaattgatttcgtcgatgtacttggcatcgaaacacttattaagttctttttccaattctacgattttatttctttcgcgagtcaattccctcctgtagtaactatctgttttgtcagattcacgctctctacgtagactttcttgcaagttactaatttgttccctagcacgtccgagtttagttttatatgctgaatagagttctgattcatcctttgagcagatctctagcgatcgtttaagattcctgattctagtctttagcctatttacctcctcagaagatgttccgttaccgttgcgtttacactcgttaagctgtctatcaagatccatgattctatctctaagacgttgcatctctctttccatatcagcattgctttcattattacgtctgcagtcactcaactgtctttcaatatctgagattctatctctaagacgtcgcatctctctctgtttcggcattggtttcattattacgtctacagtcgttcaactgtctttcaagatctgatattctagattggagtctgctaatctctgtagcattttcacggcattcactcagttgtctttcaagatctgagattttagattggagtctgctaatctctgtaagatttcctcctccgctctcgatgcagtcggtcaacttattctctagttctctaatacgcgaacgcagtgcatcaacttcttgcgtgtcttcctggttgcgtgtacattcatcgagtctagattcgagatctctaacgcgtcgtcgttcttcctcaagttctctgcgtactacagaaagcgtgtccctatcttgttgatatttagcaatttctgattctagagtactgattttgcttacgtagttactaatagttgtcttggccttatcaagatcctccttgtatttgtcgcattccttgatatccctacgaagtctggacagttcccattcgacattacgacgtttatcgatttcagctcggagatcgtcatcgcgttgttttagccacatacgactgagttcaagttctcgttgacaagatccatctacttttccattcctaatagtatccagttccttttctagttctgaacgcatttctcgttccctatcaagcgattctctcaattctcggatagtcttcttatcaatttctaataaatctgaaccatcatctgtcccattttgaatatccctgtgttctttgatctcttttgtaagtcggtcgattctttcggttttataaacagaatccctttccaaagtcctaatcttactgagtttatcactaagttctgcattcaattcggtgagttttctcttggcttcttccaactctgttttaaactctccactatttccgcattcttcctcgcatttatctaaccattcaattagtttattaataactagttggtaatcagcgattcctatagccgttcttgtaattgtgggaacataattaggatcttctaatggattgtatggcttgatagcatcatctttatcattattagggggatggacaaccttaattggttggtcctcatctcctccagtagcgtgtggttcttcaataccagtgttagtaataggcttaggcaaatgcttgtcgtacgcgggcacttcctcatccatcaagtatttataatcgggttctacgtctgaatattcttttctaagagacgcgacttcgggagttagtagaagaactctgtttctgtatctatcaacgctggaatcaatactcaagttaaggatagcgaatacctcatcgtcatcatccgtatcttctgaaacaccatcatatgacatttcatgaagtctaacgtattgataaatagaatcagatttagtattaaacagatccttaacctttttagtaaacgcatatgtatattttagatctccagatttcataatatgatcacatgccttaaatgtcagtgcttccatgatataatctggaacactaatgggtgacgaaaaagatacagcaccatatgctacgttgataaataaatctgaaccactaagtagataatgattaatgttaaggaagaggaaatattcagtatatagatatgccttagcatcatatcttgtactaaacacgctaaacagtttattgatgtgatcaatttccaacagaataattagagcagcgggaataccaacaaacatattaccacatccgtattttctatgaatatcacatatcatgttaaaaaatcttgatagaagagcgaatatctcgtctgacttaatgagtcgtagttcagcagcaacataagtcataactgtaaatagaacatactttcctgtagtgttgattctagactccacatcaacaccattattaaaaatagttttatatacatctttaatctgctctccgttaatcgtcgaacgttctagtatacggaaacactttgatttcttatctgtagttaatgacttagtgatatcacgaagaatattacgaattacatttcttgtttttcttgagagacctgattcagaactcaactcatcgttccatagtttttttacctcagtggcgaaatctttggagtgcttggtacatttttcaataaggttcgtgacctccatttattataaaaaattttattcaaaacttaactacaatcgggtaattataaaatcgtagatctcccatgtggtggaatactaccatctatcgcatgtggatggacagtaggtaatggccatgggaacagtaatgtttgcatatttatctttcttgccagtattactgcatattgtcccaatgtttcgatgtgatgttctaacctatcaactgccgctgtatcacaacaatagtgtccgatgaaattaagattatgatccaatgtgtttaatatatgattatcaagtcttatacgatccgcgtcttttttgacaggatcaggttcttctacaggaagaagtttcggcctcttatgatattcatgtctgggaaacggtggtctagggtgaggctccggtatcggagtgggttttggattataatcatcatcgtctatgacatcatcttcgacttcgatatttattttgctatcttgatgatgtcctgtatcagttgcattttcagcactcgactgaatattagcgcattcattgtctattattaccatatttctaaacccaaaatgtatgtgttgaacatcagtactatcgttgatgagtcttatagcatgaattcgcttatcgttatcgggtttatcttctgtcaccttagcaattccttttttattaaactctacataatcatatccatttctattgtttgttctaatataaacgagtatagcatcattgctaaatttttcaatagtatcgaaaacagaatatcctaaaccatataatatatattcagggacactcaaactaaatgtccaggattctcctaaatacgtaaactttaatagtgcgaaatcattcaaaaatctaccacttatagatagatagtacataaatgcgtatagtagtctacctatctctttattatgaaaaccggcattacgatcatatatgtcgtgatatacctgtgatccgtttacgttaaaccataaatacatgggtgatcctataaacatgaatttatttctaattctcagagctatagttaattgaccgtgtaatatttgcttacatgcatacttgatacgctcattaataaaatttttatcattgctcgttatctcagaatcgtatatataaggagtaccatcgtgattcttaccagatattatacaaaatactatatataaaatatattgaccaacgttagtaatcatataaatgtttaacgttttaaattttgtattcaatgatccattatcatacgctagcatggtcttatgatattcattctttaaaatataatattgtgttagccattgcattggggctcctaatggagattttttattctcatccattttaggataggctttcataaagtccctaataacttcgtgaataatgtttctatgttttctactgatgcatgtatttgcttcgatttttttatcccatgtttcatctatcatagatttaaacgcagtaatgctcgcaacattaacatcttgaaccgttggtacaattccgttccataaatttataatgttcgccatttatataactcattttttgaatatacttttaattaacaaaagagttaagttactcatatgggcgccgtccagtctgaacatcaatctttttagccagagatatcatagccgctcttagagtttcagcgtgattttccaacctaaatagaacttcatcgttgcgtttacaacacttttctatttgttcaaactttgttgttacattagtaatctttttttccaaattagttagccgttgtttgagagtttcctcattgtcgtcttcatcggctttaacaattgcttcgcgtttagcctctggctttttagcagcctttgtagaaaaaaattcagttgctggaattgcaagatcgtcatctccggggaaaagagttccgtccatttaaagtacagattttagaaactgacactctgcgttatttatatttggtacaacacatggattataaatatcgatgttaataacatcagaaaatgtaaagtctatacattgttgcatcgtgttaaattttctaatggatctagtattattgggtccaacttctgcctgaaatccaaatatggaagcggatacaaaaccgtttcctggataaaccacacatctccacttttgctttacatcagaaattgtgtcgttgacatcttgaactctcctatctaatgccggtgttccacctatagattttgaatattcgaatgctgcatgagtagcattaaattccttaatattgccataattttcatatattgagtaaccctggataaaaagtaaacacaccgcagccgtcgctaccacaataaaaaaaattgatagagagttcatttataatctattagaagctgacaaaatttttttacacgcatcagacaatgctttaataaatagttcaacatctacttttgtcatatcgaaccgatggtatgattctaacctagaattacatccgaaaaagttgactatgttcatagtcattaagtcattaacaaacaacattccagactctggattataagacgatactgtttcgtcacaattacctaccttaatcatgtgattatgaatattggctattagagcaccttctaagaaatctataatatctttgaaacacgatttaaaatcaaaccacgaatatacttctacgaagaaagttagtttacccataggagaaataactataaatggagatctaaatacaaaatccggatctatgatagttttaacattattatattctctattaaatacctccacatctaaaaatgttaattttgaaactatgtcttcgtttattaccgtacctgaactaaacgctataagctctattgtttgagaactctttaaacgatattcttgaaatacatgtaacaaagtttcctttaactcggtcggtttatctaccatagttacagaatttgtatccttatctataatataataatcaaaatcgtataaagttatataattatcgcgttcagattgggatcttttcaaatagactaaaaaccccatttctctagtaagtatcttatgtatatgtttgtaaaatatcttcatggtgggaatatgctctaccgcagttagccattcctcattgacagcggtagatgtattagacaaaactattccaatgtttaacaagggccattttacgagattattaaatccttgtttgataaatgtagccaatgagggttcgagttcaacgacgattgaattctcttcccgcggatgctgcatgatgaacgacgggatgttgttcgattgatttggaattctttttcgactttttgtttatattaaatattttaaaatttatagcggatagcaattcatgtaccacggataatgtagacgcgtattgcgcatcgatatctttattattagataaatttatcaataaatgtgagaagtttgcctcgttaaggtcttccatttaaatattatataaacatttgtgtttgtatcttattcgtcttttatggaatagttttttactagtaaagctgcaattacacactttgtccgtaaaacataaatataaacaccagcttttatcaatcgttccaaaaagtcgacggcggacatttttaacatggcatctattttaaatacacttaggtttttggaaaaaacatcattttataattgtaacgattcaataactaaagaaaagattaagattaaacataagggaatgtcatttgtattttataagccaaagcattctaccgttgttaaatacttgtctggaggaggtatatatcatgatgatttggttgtattggggaaggtaacaattaataatctaaagatgatgctattttacatggatttatcatatcatggagtgacaagtagtggagcaatttacaaattgggatcgtctatcgatagactttctctaaataggactattgttacaaaagttaataattatgatgatacattttttgacgacgatgattgatcgctattgcacaattttgtttttttactttctaatatagcgtttagattctttttcatgtgcgaatattgatttactaaaatatcgatgtttaacttttgttctatgacgtccttatcagcggtatcggtacatatacgtaattcaccttcacaaaatacggagtcttcgataataatagccaatcgattattggatctagctgtctgtatcatattcaacatgtttaatatatcctttcgtttcccctttacaggcatcgatcgtagcatattttccgcgtctgagatggaaatgttaaaactacaaaaatgcgtaatgttagcccgtcctaatattggtacgtgtctataagtttggcatagtagaataatagacgtgtttaaatgccttccaaagtttaagaattctattagagtattgcattttgatagtttatcacctacatcatcaaaaataagtaaaaagtgtgctgattttttatgattttgtgcgacagcaatacatttttctatgttacttttagttcgtatcagattatattctagagattcctgactactaacgaaattaatatgatttggccaaatgtatccatcataatctgggttataaacgggtgtaaacaagaatatatgtttatattttttaactagtgtagaaaacagagatagtaaatagatagtttttccagatccagatcctcccgttaaaaccattctaaacggcatttttaataaattttctcttgaaaattgtttttcttggaaacaattcataattatatttacagttactaaattaatttgataataaatcaaaatatggaaaactaaggtcgttagtagggaggagaacaaagaaggcacatcgtgacataaataacatttattatcatgatgacaccagaaaacgacgaagagcagacatctgtgttctccgctactgtttacggagacaaaattcaaggaaagaataaacgcaaacgcgtgattggtctatgtattagaatatctatggttatttcactactatctatgattaccatgtccgcgtttctcatagtgcgcctaaatcaatgcatgtctgctaacgaggctgctattactgacgccgctgttgccgttgctgctgcatcatctactcatagaaaggttgcgtctagcactacacaatatgatcacaaagaaagctgtaatggtttatattaccagggttcttgttatatattacattcagactaccagttattctcggatgctaaagcaaattgcactgcggaatcatcaacactacccaataaatccgatgtcttgattacctggctcattgattatgttgaggatacatggggatctgatggtaatccaattacaaaaactacatccgattatcaagattctgatgtatcacaagaagttagaaagtatttttgtgttaaaacaatgaactaatatttatttttgtacattaataaatgaaatcgcttaatagacaaactgtaagtaggtttaagaagttgtcggtgccggccgctataatgatgatactctcaaccattattagtggcataggaacatttctgcattacaaagaagaactgatgcctagtgcttgcgccaatggatggatacaatacgataaacattgttatttagatactaacattaaaatgtctacagataatgcggtttatcagtgtcgtaaattacgagccagattgcctagaccggatactagacatctgagagtattgtttagtattttttataaagattattgggtaagtttaaaaaagaccaatgataaatggttagatattaataatgataaagatatagatattagtaaattaacaaattttaaacaactaaacagtacgacggatgctgaagcgtgttatatatacaagtctggaaaactggttaaaacagtatgtaaaagtactcaatctgtactatgtgttaaaaaattctacaagtgacaacaaaaaatgaattaataataagtcgttaacgtacgccgccatggacgccgcgtttgttattactccaatgggtgtgttgactataacagatacattgtatgatgatctcgatatctcaatcatggactttataggaccatacattataggtaacataaaaactgtccaaatagatgtacgggatataaaatattccgacatgcaaaaatgctactttagctataagggtaaaatagttcctcaggattctaatgatttggctagattcaacatttatagcatttgtgccgcatacagatcaaaaaataccatcatcatagcatgcgactatgatatcatgttagatatagaagataaacatcagccattttatctattcccatctattgatgtttttaacgctacaatcatagaagcgtataacctgtatacagctggagattatcatctaatcatcaatccttcagataatctgaaaatgaaattgttgtttaattcttcattctgcatatcagacggcaatggatggatcataattgatgggaaatgcaatagtaattttttatcataaaagttgtaaagtaaataataaaacaataaatattgaactagtagtacgtatattgagcaatcagaaatgatgctggtacctcttatcacggtgaccgtagttgcgggaacaatattagtatgttatatattatatatttgtaggaaaaagatacgtactgtctataatgacaataaaattatcatgacaaaattaaaaaagataaagagttctaattccagcaaatctagtaaatcaactgatagcgaatcagactgggaggatcactgtagtgctatggaacaaaacaatgacgtagataatatttctaggaatgagatattggacgatgatagcttcgctggtagtttaatatgggataacgaatccaatgtcatggcgcctagcacagaacacatttacgatagtgttgctggaagcacgctgctaataaataatgatcgtaatgaacagactatttatcagaacactacagtagtaattaatgagacggagactgttgaagtacttaatgaagataccaaacagaatcctaactattcatccaatcctttcgtaaattataataaaaccagtatttgtagcaagtcaaatccgttcattacagaactcaacaataaatttagtgagaataatccgtttagacgagcacatagcgatgattatcttaataagcaagaacaagatcatgaacacgatgatatagaatcatcggtcgtatcattggtgtgattagtttcctttttataaaattgaagtaatatttagtattattgctgccgtcacgttgtacaaatggagatattccctgtattcggcatttctaaaattagcaattttattgctaataatgactgtagatattatatagatacagaacatcaaaaaattatatctgatgagatcaatagacagatggatgaaacggtacttcttaccaacatcttaagcgtagaagttgtaaatgacaatgagatgtaccatcttattccccatagactatcgactattatactctgtattagttctgtcggaggatgtgttatctctatagataatgacatcaatgacaaaaatattctaacatttcccattgatcatgctgtaatcatatccccactgagtaaatgtgtcgtagttagcaagggtcctacaaccatattggttgttaaagcggatatacccagcaaacgattggtaacatcgtttacaaacgacatactgtatgtaaacaatctgtcactgattaattatttgccgttgtctgtattcattattagacgagtcaccgactatttggatagacacatatgcgatcagatatttgcgaataataagtggtattccattataaccatcgacgataagcaatatcctattccatcaaactgtataggtatgtcctctgccaagtacataaattctagcatcgagcaagatactttaatacatgtttgtaacctcgagcatccattcgacttagtatacaaaaaaatgcagtcgtacaattctgtacctatcaaggaacaaatattgtacggtagaattgataatataaatatgagcattagtatttctgtggattaatagatttctagtatggggatcattaatcatctctaatctctaaatacctcataaaacgaaaaaaaagctattatcaaatactgtacggaatggattcattctcttctctttttatgaaactctgttgtatatctactgataaaactggaagcaaaaaatctgataaaaagaataagaataagatcaaggattatatggaacacgattattataaaataacaatagttcctggttcctcttccacgtctactagctcgtggtattatacacatgcctagtaatagtctctttgcgttgacggaaagcagactagaaataacaggctaaaatgttcagacaccataatagttcccaacccagataataacagagtaccatcaacacattcctttaaactcaatcccaaacccaaaaccgttaaaatgtatccggccaattgatagtagataatgaggtgtacagcgcatgataatttacacagtaaccaaaatgaaaatactttagtaattataagaaatatagatggtaacgtcatcatcaacaatccaataatatgccggagagtaaacattgacggataaaacaaaaatgctccgcataactctatcatggcaataacacaaccaaatacttgtaagattcctaaattagtagaaaatacaacggatatcgatgtataagtgatctcgagaaataataagaataaagtaatgcccgtaaagataaacatcaacattgtttggtaatcattaaaccaattagtatgaagttgaactaatttcacagtagattttattccagtgttatcctcgcatgtatacgtacctggtaagatatctttatattctataatcaatgagacatcactatccgataacgaatgaagtctagcactagtatgccatttacttaatatggtcgtcttggaagttttattataagttaaaatatcatggttgtccaatttccatctaatatactttgtcggattatctatagtacacggaataatgatggtattattacatgctgtatactctatagtctttgtagatgttataatcataaaagtacagaggtatatcaacgatattctaactcttgacattttttatttatttaaaatgatacctttgttatttattttattctattttgctaacggtatcgaatggcataagtttgaaacgagtgaagaaataatttctacttacttattagacgacgtattatacacgggtgttaatggggcggtatacacattttcaaataataaactaaacaaaactggtttagctaatactaattatatcacaacatctataaaagtagaggatgcggataaggatacattagtatgcggaaccaataacggaaatcccaaatgttggaaaatagacggttcagacgacccaaaacatagaggtagaggatacgctccttatcaaaatagcaaagtaacgataatcagtcacaacggatgtgtactatctgacataaacatatcaaaagaaggaattaaacgatggagaagatttgacggaccatgtggttatgatttatacacggcggataacgtaattccaaaagatggtttacgaggagcattcgtcgataaagatggtacttatgacaaagtttacattcttttcactgatactatcggctcaaagagaattgtcaaaattccgtatatagcacaaatgtgcctaaacgacgaaggtggtccatcatcattgtctagtcatagatggtcgacgtttctcaaagtcgaattagaatgtgatatcgacggaagaagttatagacaaattattcattctagaactataaaaacagataatgatacgatactatatgtattcttcgatagtccgcattatgtacctattctatgaataccattaaacaatctttttctacgtcaaaattggaaggatatacaaagcaattgccgtctccagctcctggtatatgtctaccagctggaaaagttgttccacataccacgtttgaagtcatagaaaaatataatgtactagatgatattataaagcctttatctaaccaacctatcttcgaaggaccgtctggtgttaaatggttcgatataaaggagaaggaaaatgaacatcgggaatatagaatatacttcataaaagaaaattctatatattcgttcgatacaaaatctaaacaaactcgtagctcgcaagtcgatgcgcgactattttcagtaatggtaacttcgaaaccgttatttatagcagatatagggataggagtaggaatgccacaaatgaaaaaaatacttaaaatgtaatcttaatcgagtacaccacacgacaatgaacaaacataagacagattatgctggttatgcttgctgcgtaatatgcggtctaattgttggaattatttttacagcgacactattaaaagttgtagaacgtaaattagttcatacaccatcaatagataaaacgataaaagatgcatatattagagaagattgtcctactgactggataagctataataataaatgtatccatttatctactgatcgaaaaacctgggaggaaggacgtaatgcatgcaaagctctaaatccaaattcggatctaattaagatagagactccaaacgagttaagttttttaagaagcattagacgcggatattgggtaggagaatccgaaatattaaaccagacaaccccatataattttatagctaagaatgccacgaagaatggaactaaaaaacggaaatatatttgtagcacaacgaatactcccaaactgcattcgtgttacactatataacaattacactacatttttatcataccactacttcggttagatgttttagaaaaaaataaatatcgccgtaccgttcttgtttttataaaaataacaattaacaattatcaaattttttctttaatattttacgtggttgaccattcttggtggtaaaataatctcttagtgttggaatggaatgctgtttaatgtttccacactcatcgtatattttgacgtatgtagtcacatcgtttacgcaatagtcagactgtagttctatcatgcttcctacattagaaggaggaacagttttaaagtctcttggttttaatctattaccgttagttttcatgaaatcctttgttttatccacttcacattttaaataaatgtccactatacattcttctgttaattttactagatcgtcatgggtcatagaatttataggttccgtagtccatggatccaaactagcaaacttcgcgtatacggtatcgcgattagtgtatacaccaactgtatgaaaattaagaaaacagtttaatagatcaacagaaatatttaatcctccgtttgatacagatgcaccatatttatggattttggattcacacgttgtttgtctgaggggttcgtctagcgttgcttctacataaacttctattcccatatattctttattgtcagaatcgcataccgatttatcatcatacactgtttgaaaactaaatggtatacacatcaaaataacaaatactaacgagtacattctgcaatattgttatcgtaattggaaaaatagtgttcgagtgagttggattatgtgagtattggattgtatattttattttatattttgtaataagaataaaatgctaatgtcaagtttattccaatagatgtcttattaaaaacatatataataaataacaatggctgaatggcataaaattatcgaggatatctcaaaaaataataagttcgaggatgccgccatcgttgattacaagactacaaagaatgttctagctgctattcctaacagaacatttgccaagattaatccgggtgaaattattcctctcatcactaatcgtaatattctaaaacctcttattggtcagaaatattgtattgtatatactaactctctaatggatgagaacacgtatgctatggagttgcttactgggtacgcccctgtatctccgatcgttatagcgagaactcataccgcacttatatttttgatgggtaagccaacaacatccagacgtgacgtgtatagaacgtgtagagatcacgctacccgtgtacgcgcaactggtaattaaaataaaaagtaatattcatatgtagtgtcaattttaaatgatgatgatgaaatggataatatccatattgacgatgtcaataatgccggtattggcatacagctcatcgatttttagatttcattcagaggatgtggaattatgttatgggcatttgtattttgataggatctataatgtagtaaatataaaatataatccgcatattccatatagatataattttattaatcgcacgttaaccgtagatgaactagacgataatgtcttttttacacatggttattttttaaaacacaaatatggttcacttaatcctagtttgattgtctcattatcaggaaacttaaaatataatgatatacaatgctcagtaaatgtatcgtgtctcattaaaaatttggcaacgagtacatctactatattaacatctaaacataagacttattctctacatcggtccacgtgtattactataataggatacgattctattatatggtataaagatataaatgacaagtataatggcatctatgattttactgcaatatgtatgctaatagcgtctacattgatagtgaccatatacgtgtttaaaaaaataaaaatgaactcttaattatgctatgctattagaaatggataaaatcaaaattacggttgattcaaaaattggtaatgttgttaccatatcgtataacttggaaaagataactattgatgtcacacctaaaaagaaaaaagaaaaggatgtattattagcgcaatcagttgctgtcgaagaggcaaaagatgtcaaggtagaagaaaaaaatattatcgatattgaagatgacgatgatatggatgtagaaagcgcataatacgatctataaaaataagtatataaatactttttatttactgtactcttactgtgtagtggtgataccctactcgattatttttttaaaaaaatacttattctgattcttctagccatttccgtgttcgttcgaatgccacatcgacgttaaagataggggagtagttgaaatctagttctgcattgttggtacgcacctcaaatgtagtgttggatatcttcaacgtatagttgttgagtagtgatggttttctaaatagaattctcttcatatcattcttgcacgcgtacatttttagcatccatcttggaattctagatccttgttctattcccaatggtttcatcaatagaagattaaacatatcgtacgaacacgatggagagtaatcgtagcaaaagtaagcatttcctttaatctcagatcccggatactggatatattttgcagccaacacgtgcatccatgcaacatttcctacatatacccggctatgcaccgcgtcatcatcgactgtacgatacataatgttaccgtgttgcttacattgctcgtaaaagactttcgtcaatttgtctccttctccgtaaattccagtgggtcttaggcaacaagtatacaattttgctccattcatgattacggaattattggctttcataaccagttgctcggccatacgtttactttttgcgtatacatgtcctggtgatatatcataaagggtatgctcatggccgatgaatggatcaccgtgtttatttggtcctattgcttccatgctactagtatagatcaaatacttgattcctaggtccacacaagctgccaatatagtctgtgttccataatagtttactttcatgatttcattatcggtgtattttccaaatacatccactagagcagccgtatgaataatcagatttaccccatctagcgcttctctcaccttatcaaagtcgtttatatcacattgtatatagtttataaccttaactttcgaggttattggttgtggatcttctacaatatctatgactctgatttcttgaacatcatctgcactaattaacagttttactatatacctgcctagaaatccggcaccaccagtaaccgcgtacacggccattgctgccactcataatatcagactacttattctattttactaaataatggctgtttgtataatagaccacgataatatcagaggagttatttactttgaaccagtccatggaaaagataaagttttaggatcagttattggattaaaatccggaacgtatagtttgataattcatcgttacggagatattagtcaaggatgtgattccataggcagtccagaaatatttatcggtaacatctttgtaaacagatatggtgtagcatatgtttatttagatacagatgtaaatatatctacaattattggaaaggcgttatctatttcaaaaaatgatcagagattagcgtgtggagttattggtatttcttacataaatgaaaagataatacattttcttacaattaacgagaatggcgtttgatatatcagttaatgcgtctaaaacaataaatgcattagtttacttttctactcagcaaaataaattagtcatacgtaatgaagttaatgatacacactacactgtcgaatttgatagggacaaagtagttgacacgtttatttcatataatagacataatgacaccatagagataagaggggtgcttccagaggaaactaatattggttgcgcggttaatacgccggttagtatgacttacttgtataataagtatagttttaaactgattttagcagaatatataagacacagaaatactatatccggcaatatttattcggcattgatgacactagatgatttggctattaaacagtatggagacattgatctattatttaatgagaaacttaaagtagactccgattcgggactatttgactttgtcaactttgtaaaggatatgatatgttgtgattctagaatagtagtagctctatctagtctagtatctaaacattgggaattgacaaataaaaagtataggtgtatggcattagccgaacatatatctgatagtattccaatatctgagctatctagactacgatacaatctatgtaagtatctacgcggacacactgagagcatagaggataaatttgattattttgaagacgatgattcgtctacatgttctgccgtaaccgacagggaaacggatgtataattttttttatagcgtgaaggatatgataaaaaatataattgttgtatttatcccattccaatcaccttatatgattctgtaacacaatgaaggagtctcatagatgtatagaggtcagatactggtttgataaactgtttattccacatgagtatgtttgactttatggttagacccgcatactttaacaaatcactgaaaattggagttaggtattgacctctcagaatcagttgccgttctggaacattaaatgtattttttatgatatactccaacgcatttatgtgggcatacaacaagtcattactaatggagtattccaagagttttagttgtctagtatttaacaagagaagagatttcaacagactgtttatgaactcgaatgccgcctcattgtcgcttatattgatgatgtcgaattctcccaatatcatcaccgatgagtagctcatcttgttatcgggatccaagttttctaaagatgtcattaaaccctcgatcatgaatggatttatcatcatcgtttttatgttggacatgagcttagtccgtttgtccacatctatagacgacgatttctgaattattttatatatccctctctttaactccaggaacttgtcaggatggtctactttaatatgttctcgtctaagagatgaaaatctttggatggttgcacgcgacttttctctaaaggatgacgttgcccaagatcctctcttaaatgaatccatcttatccttggacaagatggacagtctattttccttagatggtttaatatttttgttacccatgatctataaaggtagacctaatcgtctcggatgacctatatatttattttcagttttattatacgcataaattgtaaaaaatatgttaggtttacaaaaatgtctcgtggggcattaatcgtttttgaaggattggacaaatctggaaaaacaacacaatgtatgaacatcatggaatctataccggcaaacacgataaaatatcttaactttcctcagagatccactgtcactggaaagatgatagatgactatctaactcgtaaaaaaacctataatgatcatatagttaatctattattttgtgcaaatagatgggagtttgcatcttttatacaagaacaactagaacagggaattactttaatagttgatagatacgcgttctctggagtagcgtatgccgccgctaaaggcgcgtcaatgactctcagtaagagttatgaatctggattgcctaaacccgacttagttatattcttggaatctggtagcaaagaaattaatagaaacgtcggcgaggaaatttatgaagatgttacattccaacaaaaggtattacaagaatataaaaaaatgattgaagaaggagatattcattggcaaattatttcttctgaattcgaggaagatgtaaagaaggagttgattaagaatatagttatagaggctatacacacggttactggaccagtggggcaactgtggatgtaatagtgaaattacattttttataaatagatgttagtacagtgttataaatggatgaagcatattactctggcaacttggaatcagtactcggatacgtgtccgatatgcataccgaactcgcatcaatatctcaattagttattgccaagatagaaactatagataatgatatattaaacaaggacattgtaaattttatcatgtgtagatcaaacttggataatccatttatctctttcctagatactgtatatactattatagatcaagagaactatcagaccgaattgattaattcattagacgacaatgaaattatcgattgtatagttaataagtttatgagcttttataaggataacctagaaaatatagtagatgctatcattactctaaaatatataatgaataatccagattttaaaactacgtatgccgaagtactcggttccagaatagccgatatagatattaaacaagtgatacgtgagaatatactacaattgtctaatgatatccgcgaacgatatttgtgaaaaatattaaaaaaaaatactttttttattaaatgacgtcgcttcgcgaatttagaaaattatgctgtgatatatatcacgcatcaggatataaagaaaaatctaaattaattagagactttataacagatagggatgataaatatttgatcattaagctattgcttcccggattagacgatagaatttataacatgaacgataaacaaattataaaattatatagtataatatttaaacaatctcaggaagatatgctacaagatttaggatacggatatataggagacactattaggactttcttcaaagagaacacagaaatccgtccacgagataaaagcattttaactttagaagacgtggatagtttcttaactacgttatcatccgtaactaaagaatcgcatcaaataaaattattgactgatatcgcatccgtttgtacatgtaatgatttaaaatgtgtagtcatgcttattgataaagatctaaaaattaaagcgggtcctcggtacgtacttaacgctattagtcctaatgcctatgatgtgtttagaaaatctaataacttgaaagagataatagaaaatgcatctaaacaaaatctagactctatatctatttctgttatgactccaattaatcccatgttagcggaatcgtgtgattctgtcaataaggcgtttaaaaaatttccatcaggaatgtttgcggaagtcaaatacgatggtgaaagagtacaagttcataaaaataataacgagtttgccttctttagtagaaacatgaaaccagtactctctcataaagtggattatctcaaagaatacataccgaaagcatttaaaaaagctacgtctatcgtattggattctgaaattgttcttgtagacgaacataatgtaccgctcccgtttggaagtttaggaatacacaaaaagaaagaatataaaaactctaacatgtgtttgttcgtgtttgactgtttgtactttgatggattcgatatgacggacattccattgtacgaacgaagatcttttctcaaagatgttatggttgaaatacccaatagaatagtattctcagagttgacgaatattagtaacgagtctcagttaactgacgtattggatgatgcactaacgagaaaattagaaggattggtcttaaaagatattaatggagtatacgaaccgggaaagagaagatggttaaaaataaagcgagactatttgaacgagggttccatggcagattctgccgatttagtagtactaggtgcttactatggtaaaggagcaaagggtggtatcatggcagtctttctaatgggttgttacgacgatgaatccggtaaatggaagacggttaccaagtgttcaggacacgatgataatacgttaagggttttgcaagaccaattaacgatggttaaaattaacaaggatcccaaaaaaattccagagtggttggtagttaataaaatctatattcccgattttgtagtagaggatccgaaacaatctcagatatgggaaatttcaggagcagagtttacatcttccaagtcccataccgcaaatggaatatccattagatttcctagatttactaggattagagaagataaaacgtggaaagaatctactcatctaaacgatttagtaaacttgactaaatcttaatagttacatacaaactgaaaattaaaataacactatttagttggtggtcgccatggatggtgttattgtatactgtctaaacgcgttagtaaaacatggcgaggaaataaatcatataaaaaatgatttcatgattaaaccatgttgtgaaagagtttgtgaaaaagtcaagaacgttcacattggcggacaatctaaaaacaatacagtgattgcagatttgccatatatggataatgcggtatccgatgtatgcaattcactgtataaaaagaatgtatcaagaatatccagatttgctaatttgataaagatagatgacgatgacaagactcctactggtgtatataattattttaaacctaaagatgttattcctgttatcatatctataggaaaggataaagatgtctgtgaactattaatctcatcagacatatcgtgtgcatgcgtggagttaaattcatatcacgtagccattcttcccatggatgtttccttttttaccaaaggaaatgcatcattgattattctcctgtttgatttctctatcgatgcagcacctctcttaagaagtgtaaccgataataatgttattatatctagacaccagcgtctacatgacgagcttccgagttccaattggttcaagttttacataagtataaagtccgactattgttctatattatatatggttgttgatggatctgtgatgcatgcgatagctgataatagaactcacgcaattattagcaaaaatatattagacaatactacgattaacgatgagtgtagatgctgttattttgaaccacagattaggattcttgatagagatgagatgctcaatggatcatcgtgtgatatgaacagacattgtattatgatgaatttacctgatgtaggcaaatttggatctagtatgttggggaaatatgaacctgacatgattaagattgctctttcggtggctggtaatttaataagaaatcgagactacattcccgggagacgaggatatagctactacgtttacggtatagcctctagataatttttttaagcacgaaataaaaaacataattttaaaccaatctatttcatactattttgtgtgatcaccatggacataaagatagatattagtatttctggtgataaatttacggtgactactaggagggaaaatgaagaaagaaaaaaatatctacctctccaaaaagaaaaaactactgatgttatcaaacctgattatcttgagtacgatgacttgttagatagagatgagatgtttactattctagaggaatattttatgtacagaggtctattaggcctcagaataaaatatggacgactctttaacgaaattaaaaaattcgacaatgatgcggaagaacaattcggtactatagaagaactcaagcagaaacttagattaaattctgaagagggagcagataactttatagattatataaaggtacaaaaacaggatatcgtcaaacttactgtatacgattgcatatctatgataggattgtgtgcatgcgtggtagatgtttggagaaatgagaaactgttttctagatggaaatattgtttacgagctattaaactgtttattaatgatcacatgcttgataagataaaatctatactgcagaatagactagtatatgtggaaatgtcatagaaagttaaaagttaatgagagcaaaaatatataaggttgtattccatatttgttattttttctgtaatagttagaaaaatacattcgatggtctatctaccagattattatgtgttataaggtactttttctcataataaactagagtatgagtaagatagtgtttttcaaaacatataaatctaaaattgatggatgagatatacagctattaatttcgaaaatatattttaatctgataactttaaacatggatttttgatggtggtttaacgttttaaaaaaagattttgttattgtagtatatgataatattaaaagatggatataaagaatttgctgactgcatgtactattttttacattactacattggctacggcagatatacctactccgccaccaacgggtcatgtgacaagggagaatatcttgataagaggcataatcaatgttgtaatcggtgtccacctggagaatttgccaaggttagatgtaatggtaacgataacacaaaatgtgaacgctgcccacctcatacatataccacaatcccaattattctaatggatgtcatcaatgtagaaaatgcccaaccggatcatttgataaggtaaagtgtaccggaacacagaacagtaaatgttcgtgtcttcctggttggtattgtgctactgattcttcacagactgaagattgttgaaattgtgtaccaaaaaggagatgtccatgcggatactttggtggaatagatgaacaaggaaatcctatttgtaaatcgtgttgtgttggtgaatattgcgactacctacgtaattatagacttgatccatttcctccatgcaaactatctaaatgtaattaattatgattttgatgataatgttaccatacattatatcgctacttggttagtgtattattcagtatgaagacctattaataattacttatcttttgacgatcttgttataattataatataaaaatacttatggcatagtaactcataattgctgacgcgataaattcgtaataatctgttttgttcaaatttttataaggaatctacaggcataaaaataaaaatataatttataatatactcttacagcgcgccatcatgaataacagcagtgaattgattgctgttattaatggatttagaaatagtggacgattttgtgatattagtatagttattaatgatgaaaggataaacgctcataaactcatcctatctggagcctccgaatatttttccattctgttttccaataattttatcgattctaatgaatacgaagttaatctaagtcatttagattatcaaagcgttaacgatttgatcgattacatttatgggatacctttgagcctaactaacgataacgtgaaatatattctttcaaccgctgattttttacaaattggatctgctattacggagtgtgaaaattacatacttaaaaatctttgttctaaaaactgtatcgatttctacatatacgctgataaatataataacaagaaaatagaatcagcgtcgtttaacacaatattacaaaatattttgagactcatcaacgatgaaaactttaaatacttaacagaggaatcaatgataaaaattttaagcgatgatatgttaaatataaaaaatgaggattttgcaccactaattctcattaaatggttagagagtactcaacaatcatgcaccgtcgagttacttagatgcctcagaatatcattgctttccccacaagttataaaatcactttatagtcatcaactggttagttcaatctacgaatgtataacattcttaaacaatatagcattcttggatgaatcatttcctagataccatagcatcgagttgatatctatcggtataagtaattcgcatgataagatttccataaactgctacaatcataaaaaaaatacatgggaaatgatatcttcacgtagatataggtgtagtttcgcagtggccgtcctggataatattatctatatgatgggtggatatgatcagtccccgtatagaagttcaaaggttatagcgtacaatacatgtacaaattcttggatatatgatataccagagctaaaatatcctcgttctaattgtgggggactggctgatgacgaatacatttattgtataggcggcatacgcgatcaggattcatcgttgacatctagtattgataaatggaagccatcaaaaccatattggcagaagtatgctaaaatgcgcgaaccaaaatgtgatatgggggttgcgatgttaaacggattaatatatgtcatgggtggaatcgttaaaggtgacacgtgtaccgacgcactagagagtttatcagaagatggatggatgaagcatcaacgtcttccaataaaaatgtccaatatgtcgacgattgttcatgatggcaagatttatatatctggaggttacaacaatagtagtgtagttaatgtaatatcgaatctagtccttagctataatccgatatatgatgaatggaccaaattatcatcattaaacattcctagaattaatcccgctctatggtcagcgcataataaattatatgtaggaggaggaatatctgatgatgttcgaactaatacatctgaaacatacgataaagaaaaagattgttggacattggataatggtcacgtgttaccacgcaattatataatgtataaatgcgaaccgattaaacataaatatccattggaaaaaacacagtacacgaatgattttctaaagtatttggaaagttttataggtagttgatagaacaaaatacataattttgtaaaaataaatcactttttatactaatatgacacgattaccaatacttttgttactaatatcattagtatacgctacaccttttcctcagacatctaaaaaaataggtgatgatgcaactctatcatgtaatcgaaataatacaaatgactacgttgttatgagtgcttggtataaggagcccaattccattattcttttagctgctaaaagcgacgtcttgtattttgataattataccaaggataaaatatcttacgactctccatacgatgatctagttacaactatcacaattaaatcattgactgctagagatgccggtacttatgtatgtgcattctttatgacatcgcctacaaatgacactgataaagtagattatgaagaatactccacagagttgattgtaaatacagatagtgaatcgactatagacataatactatctggatctacacattcaccggaaactagttctgagaaacctgattatatagataattctaattgctcgtcggtattcgaaatctaagcttaaaaattgaaattttattttttttttttggaatataaataagctcgaagtcgaccaccatggtgggtgaggatagcgtgctgatcaccgagaacatgcacatgaaactgtacatggagggcaccgtgaacgaccaccacttcaagtgcacatccgagggcgaaggcaagccctacgagggcacccagaccatgaagatcaaggtggtcgagggcggccctctccccttcgccttcgacatcctggctaccagcttcatgtacggcagcaaaacctttatcaaccacacccagggcatccccgacttctttaagcagtccttccctgagggcttcacatgggagaggatcaccacatacgaagacgggggcgtgctgaccgctacccaggacaccagcctccagaacggctgcctcatctacaacgtcaagatcaacggggtgaacttcccatccaacggccctgtgatgcagaagaaaacactcggctgggaggccagcaccgagatgctgtaccccgctgacagcggcctgagaggccatagccagatggccctgaagctcgtgggcgggggctacctgcactgctccctcaagaccacatacagatccaagaaacccgctaagaacctcaagatgcccggcttctacttcgtggacaggagactggaaagaatcaaggaggccgacaaagagacctacgtcgagcagcacgagatggctgtggccaggtactgcgacctgcctagcaaactggggcacagctgattaattaatttttatcgatctaattcaacaatgtctggagagctcggtaccaagcttcgcaggatcccgactccggaaccaattactgataaagaagatcatacagttacagacactgtctcatacactacagtaagtacatcatctggaattgtcactactaaatcaaccaccgatgatacgtacaatgataatgatacagtaccaccaactactgtaggcggtagtacaacctctattagcaattataaaaccaaggactttgtagaaatatttggtattaccgcattaattatattgtcggccgtggcaatattctgtattacgtattatatatgtaataaacgttcacgtaaatacaaaacagagaacaaagtctagatttttgacttacataaatgtctgggatagtaaaatctatcatattgagcggaccatctggtttaggaaagacagccatagccaaaagactatgggaatatatttggatttgtggtgtcccataccactagatttcctcgtcctatggaacgagaaggtgttgattaccattacgttaacagagaggccatctggaagggaatagccgccggaaactttctagaacatactgagtttttaggaaatatttacggaacttctaaaacagctgtgaatacagcggctattaataatcgtatttgtgtgatggatctaaacatcgacggtgttagaagtcttaaaaatacgtacctaatgccttactcggtgtatataagacctacctctcttaaaatggttgagaccaagcttcgttgtagaaacactgaagctaacgatgagattcatcgtcgcgtgatattggcaaaaacggatatggatgaggccaacgaagcaggtctattcgacactattatcattgaagatgatgtgaatttagcatatagtaagttaattcagatactacaggaccgtattagaatgtattttaacactaattagagacttaagacttaaaacttgataattaataatataactcgtttttatatgtggctatttcaacgtctaatgtattagttaaatattaaaacttaccacgtaaaacttaaaatttaaaatgatatttcattgacagatagatcacacattatgaactttcaaggacttgtgttaactgacaattgcaaaaatcaatgggtcgttggaccattaataggaaaaggtggattcggtagtatttatactactaatgacaataattatgtagtaaaaatagagcccaaagctaacggatcattatttaccgaacaggcattttatactagagtacttaaaccatccgttatcgaagaatggaaaaaatctcacaatataaagcacgtaggtcttatcacgtgcaaggcatttggtctatacaaatccattaatgtggaatatcgattcttggtaattaatagattaggtgcagatctagatgcggtgatcagagccaataataatagattaccaaaaaggtcggtgatgttgatcggaatcgaaatcttaaataccatacaatttatgcacgagcaaggatattctcacggagatattaaagcgagtaatatagtcttggatcaaatagataagaataaattatatctagtggattacggattggtttctaaattcatgtctaatggagaacatgttccatttataagaaatccaaataaaatggataacggtactctagaatttacacctatagattcgcataaaggatacgttgtatctagacgtggagatctagaaacacttggatattgtatgattagatggttgggaggtatcttgccatggactaagatatctgaaacaaagaattgtgcattagtaagtgccacaaaacagaaatatgttaacaatactgcgactttgttaatgaccagtttgcaatatgcacctagagaattgctgcaatatattaccatggtaaactctttgacatattttgaggaacccaattatgacgagtttcggcacatattaatgcagggtgtatattattaagtgtggtgtttggtcgatgtaaaatttttgtcgataaaaattaaaaaataacttaatttattattgatctcgtgtgtacaaccgaaatcatggcgatgttttacgcacacgctctcggtgggtacgacgagaatcttcatgcctttcctggaatatcatcgactgttgccaatgatgtcaggaaatattctgttgtgtcagtttataataacaagtatgacattgtaaaagacaaatatatgtggtgttacagtcaggtgaacaagagatatattggagcactgctgcctatgtttgagtgcaatgaatatctacaaattggagatccgatccatgatcaagaaggaaatcaaatctctatcatcacatatcgccacaaaaactactatgctctaagcggaatcgggtacgagagtctagacttgtgtttggaaggagtagggattcatcatcacgtacttgaaacaggaaacgctgtatatggaaaagttcaacatgattattctactatcaaagagaaggccaaagaaatgaatgcacttagtccaggacctatcattgattaccacgtctggataggagattgtatctgtcaagttactgctgtggacgtacatggaaaggaaattatgagaatgagattcaaaaagggtgcggtgcttccgatcccaaatctggtaaaagttaaacttggggagaatgatacagaaaatctttcttctactatatcggcggcaccatcgaggtaaccacctctctggaagacagcgtgaataatgtactcatgaaacgtttggaaactatacgccatatgtggtctgtcgtatatgatcattttgatattgtgaatggtaaagaatgctgttatgtgcatacgcatttgtctaatcaaaatcttataccgagtactgtaaaaacaaatttgtacatgaagactatgggatcatgcattcaaatggattccatggaagctctagagtatcttagcgaactgaaggaatcaggtggatggagtcccagaccagaaatgcaggaatttgaatatccagatggagtggaagacactgaatcaattgagagattggtagaggagttcttcaatagatcagaacttcaggctggtgaatcagtcaaatttggtaattctattaatgttaaacatacatctgtttcagctaagcaactaagaacacgtatacggcagcagcttcctttatactctcatcttttaccaacacaaagggtggatatttgttcattggagttgataataatacacacaaagtaattggattcacggtgggtcatgactacctcagactggtagagaatgatatagaaaagcatatcaaaagacttcgtgttgtgcatttctgtgagaagaaagaggacatcaagtacacgtgtcgattcatcaaggtatataaacctggggatgaggctacctcgacatacgtgtgcgctatcaaagtggaaagatgctgttgtgctgtgtttgcagattggccagaatcatggtatatggatactaatggtatcaagaagtattctccagatgaatgggtgtcacatataaaattttaattaatgtaatagagaacaaataataaggttgtaatatcatatagacaataactaacaattaattagtaactgttatctcttttttaactaaccaactaactatatacctattaatacatcgtaattatagttcttaacatctattaatcattaattcgcttctttaattttttataaactaacattgttaattgaaaagggataacatgttacagaatataaattatatatggatttttttaaaaaggaaatacttgactggagtatatatttatctcttcattatatagcacgcgtgttttccaatttttccacatcccatataatacaggattataatctcgttcgaacatacgagaaagtggataaaacaatagttgattttttatctaggttgccaaatttattccatattttagaatatggggaaaatattctacatatttattctatggatgatgctaatacgaatattataattttttttctagatagagtattaaatattaataagaacgggtcatttatacacaatctcaggttatcatcatccattaatataaaagaatatgtatatcaattagttaataatgatcatccagataataggataagactaatgcttgaaaatggacgtagaacaagacattttttgtcctatatatcagatacagttaatatctatatatgtattttaataaatcatggattttatatagatgccgaagacagttacggttgtacattattacatagatgtatatatcactataagaaatcagaatcagaatcatacaatgaattaattaagatattgttaaataatggatcagatgtagataaaaaagatacgtacggaaacacaccttttatcctattatgtaaacacgatatcaacaacgtggaattgtttgagatatgtttagagaatgctaatatagactctgtagactttaatagatatacacctcttcattatgtctcatgtcgtaataaatatgattttgtaaagttattaatttctaaaggagcaaatgttaatgcgcgtaatagattcggaactactccattttattgtggaattatacacggtatctcgcttataaaactatatttggaatcagacacagagttagaaatagataatgaacatatagttcgtcatttaataatttttgatgctgttgaatctttagattatctattatccagaggagttattgatattaactatcgtactatatacaacgaaacatctatttacgacgctgtcagttataatgcgtataatacgttggtctatctattaaacagaaatggtgattttgagacgattactactagtggatgtacatgtatttcggaagcagtcgcaaacaacaacaaaataataatggaagtactattgtctaaacgaccatctttgaaaattatgatacagtctatgatagcaattactaaacataaacagcataatgcagatttattgaaaatgtgtataaaatatactgcgtgtatgaccgattatgatactcttatagatgtacagtcgctacagcaatataaatggtatattttaaaatgtttcgatgaaatagatatcatgaagagatgttatataaaaaataaaactgtattccaattagttttttgtatcaaagacattaatactttaatgagatacggtaaacatccttctttcgtgaaatgcactagtctcgacgtatacggaagtcgtgtacgtaatatcatagcatctattagatatcgtcagagattaattagtctattatccaagaagctggatcctggagataaatggtcgtgttttcctaacgaaataaaatataaaatattggaaaactttaacgataacgaactatccacatatctaaaaatcttataaacactattaaaatataaaatctaagtaggataaaatcacactacatcattgtttccttttagtgctcgacagtgtatactatttttaacactcataaataaaaatgaaaacgatttccgttgttacgttgttatgcgtactacctgctgttgtttattcaacatgtactgtacccactatgaataacgctaaattaacgtctaccgaaacatcgtttaatgataaacagaaagttacgtttacatgtgatcagggatatcattcttcggatccaaatgctgtctgcgaaacagataaatggaaatacgaaaatccatgcaaaaaaatgtgcacagtttctgattacatctctgaattatataataaaccgctatacgaagtgaattccaccatgacactaagttgcaacggcgaaacaaaatattttcgttgcgaagaaaaaaatggaaatacttcttggaatgatactgttacgtgtcctaatgcggaatgtcaacctcttcaattagaacacggatcgtgtcaaccagttaaagaaaaatactcatttggggaatatatgactatcaactgtgatgttggatatgaggttattggtgcttcgtacataagttgtacagctaattcttggaatgttattccatcatgtcaacaaaaatgtgatatgccgtctctatctaatggattaatttccggatctacattttctatcggtggcgttatacatcttagttgtaaaagtggttttacactaacggggtctccatcatccacatgtatcgacggtaaatggaatcccgtactcccaatatgtgtacgaactaacgaagaatttgatccagtggatgatggtcccgacgatgagacagatttgagcaaactctcgaaagacgttgtacaatatgaacaagaaatagaatcgttagaagcaacttatcatataatcatagtggcgttaacaattatgggcgtcatatttttaatctccgttatagtattagtttgttcctgtgacaaaaataatgaccaatataagttccataaattgctaccgtaaatataaatccgttaaaataatgaataattaataacgaacaagtatcaaaagattaaagaattatagctagaatcaattgagatgtcttcttcagtggatgttgatatctacgatgccgttagagcatttttactcaggcactattataacaagagatttattgtgtatggaagaagtaacgccatattacataatatatacaggctatttacaagatgcgccgttataccgttcgatgatatagtacgtactatgccaaatgaatcacgtgttaaacaatgggtgatggatacacttaatggtataatgatgaatgaacgcgatgtttctgtaagcgttggcaccggaatactattcatggaaatgtttttcgattacaataaaaatagtatcaacaatcaactaatgtatgatataattaatagcgtatctataattctagctaatgagagatatagaagcgcttttaacgacgatggtatatacatccgtagaaatatgattaacaagttgtacggatacgcatctctaactactattggcacgatcgctggaggtgtttgttattatctgttgatgcatctagttagtttgtataaataattatttcaatatactagttaaaattttaagattttaaatgtataaaaaactaataacgtttttatttgtaataggtgcattagcatcctattcgaataatgagtacactccgtttaataaactgagtgtaaaactctatatagatggagtagataatatagaaaattcatatactgatgataataatgaattggtgttaaattttaaagagtacacaatttctattattacagagtcatgcgacgtcggatttgattccatagatatagatgttataaacgactataaaattattgatatgtataccattgactcgtctactattcaacgcagaggtcacacgtgtagaatatctaccaaattatcatgccattatgataagtacccttatattcacaaatatgatggtgatgagcgacaatattctattactgcagagggaaaatgctataaaggaataaaatatgaaataagtatgatcaacgatgatactctattgagaaaacatactcttaaaattggatctacttatatatttgatcgtcatggacatagtaatacatattattcaaaatatgatttttaaaaatttaaaatatattatcacttcagtgacagtagtcaaataacaaacaacaccatgagatatattataattctcgcagttttgttcattaatagtatacacgctaaaataactagttataagtttgaatccgtcaattttgattccaaaattgaatggactggggatggtctatacaatatatcccttaaaaattatggcatcaagacgtggcaaacaatgtatacaaatgtaccagaaggaacatacgacatatccgcatttccaaagaatgatttcgtatctttctgggttaaatttgaacaaggcgattataaagtggaagagtattgtacgggactatgcgtcgaagtaaaaattggaccaccgactgtaacattgactgaatacgacgaccatatcaatttgtacatcgagcatccgtatgctactagaggtagcaaaaagattcctatttacaaacgcggtgacatgtgtgatatctacttgttgtatacggctaacttcacattcggagattctaaagaaccagtaccatatgatatcgatgactacgattgcacgtctacaggttgcagcatagactttgtcacaacagaaaaagtgtgcgtgacagcacagggagccacagaagggtttctcgaaaaaattactccatggagttcgaaagtatgtctgacacctaaaaagagtgtatatacatgcgcaattagatccaaagaagatgttcccaatttcaaggacaaaatggccagagttatcaagagaaaatttaataaacagtctcaatcttatttaactaaatttctcggtagcacatcaaatgatgttaccacttttcttagcatgcttaacttgactaaatattcataactaatttttattaatgatacaaaaacgaaataaaactgcatattatacactggttaacgcccttataggctctaaccattttcaagatgaggtccctgattatagtccttctgttcccctctatcatctactccatgtctattagacaatgtgagaagactgaagaggaaacatggggattgaaaatagggttgtgtataattgccaaagatttctatcccgaaagaactgattgcagtgttcatctcccaactgcaagtgaaggattgataactgaaggcaatggattcagggatatacgaaacaccgataaattataaaaaaagcaatgtgtccgctgtttccgttaataatactattttcgtaactggcggattattcataaataactctaatagcacgatcgtggttaacaatatggaaaaacttgacatttataaagacaaacaatggtcgattatagaaatgcctatggctagggtatatcacggcatcgactcgacatttggaatgttatattttgccggaggtctatccgttaccgaacaatatggtaatttagagaaaaacaacgagatatcttgttacaatcctagaacgaataagtggtttgatatttcatatactatttataagatatccatatcatcattgtgtaaactaaataacgtcttctatgtatttagtaaggacattggatatgtggaaaagtatgatggtgcatggaagttagtacatgatcgtctccccgctataaaggcattatcaacttctccttattgattgaaaatgaaaatataaatagtttttatgtatagcagtattaccctatagttttattgcttactactaacatggatacagatgttacaaatgtagaagatatcataaatgaaatagatagagagaaagaagaaatactaaaaaatgtagaaattgaaaataataaaaacattaacaagaatcatccaagtggatatattagagaagcactcgttattaataccagtagtaatagtgattccattgataaagaagttatagaatgtatctgtcacgatgtaggaatatagatcatatctactaatttttataatcgatacaaaacataaaaaacaactcgttattacatagcaggcatggaatccttcaagtattgttttgataacgatggcaagaaatggattatcggaaatactttatattctggtaattcaatactatataaggtcagaaaaaatttcactagttcgttctacaattacgtaatgaagatagatcacaaatcacacaagccattgttgtctgaaatacgattctatatatctgtattggatcctttgactatcgacaactggacacgggaacgtggtataaagtatttggctattccagatctgtatggaattggagaaaccgatgattatatgttcttcgttataaagaatttgggaagagtattcgccccaaaggatactgaatcagtcttcgaagcatgcgtcactatgataaacacgttagagtttatacactctcaaggatttacccatggaaaaatagaaccgaggaatatactgattagaaataaacgtctttcactaattgactattctagaactaacaaactatacaagagtggaaactcacatatagattacaacgaggacatgataacttcaggaaatatcaattatatgtgtgtagacaatcatcttggagcaacagtttcaagacgaggagatttagaaatgttgggatattgcatgatagaatggttcggtggcaaacttccatggaaaaacgaaagtagtataaaagtaataaaacaaaaaaaagaatataaaaaatttatagctactttctttgaggactgttttcctgaaggaaatgaacctctggaattagttagatatatagaattagtatacacgttagattattctcaaactcctaattatgacagactacgtaaactgtttatacaagattgaaattatattcttttttttatagagtgtggtagtgttacggatatttaatattagactatctctatcgcgctacacgaccaatatcgattactatggatatcttcagggaaatcgcatcttctatgaaaggagagaatgtattcatttctccagcgtcaatctcgtcagtattgacaatactgtattatggagctaatggatccactgctgaacagctatcaaaatatgtagaaaaggaggagaacatggataaggttagcgctcaaaatatctcattcaaatccataaataaagtatatgggcgatattctgccgtgtttaaagattcctttttgagaaaaattggcgataagtttcaaactgttgacttcactgattgtcgcactatagatgcaatcaacaagtgtgtagatatctttactgaggggaaaatcaatccactattggatgaaccattgtctcctgatacctgtctcctagcaattagtgccgtatactttaaagcaaaatggttgacgccattcgaaaaggaatttaccagtgattatcccttttacgtatctccgacggaaatggtagatgtaagtatgatgtctatgtacggcaaggcatttaatcacgcatctgtaaaggaatcattcggcaacttttcaatcatagaactgccatatgttggagatactagtatgatggtcattcttccagacaagattgatggattagaatccatagaacaaaatctaacagatacaaattttaagaaatggtgtaactctctggaagctacgtttatcgatgttcacattcccaagtttaaggtaacaggctcgtataatctggtggatactctagtaaagtcaggactgacagaggtgttcggttcaactggagattatagcaatatgtgtaattcagatgtgagtgtcgacgctatgatccacaaaacgtatatagatgtcaatgaagagtatacagaagcagctgcagcaacttgtgcactggtgtcagactgtgcatcaacaattacaaatgagttctgtgtagatcatccgttcatctatgtgattaggcatgttgatggaaaaattcttttcgttggtagatattgctctccgacaactaattgttaaccattttttttaaaaaatagaaaaaacatgtggtattagtgcaggtcgttattcttccaattgcaattggtaagatgacggccaactttagtacccacgtcttttcaccacagcactgtggatgtgacagactgaccagtattgatgacgtcagacaatgtttgactgaatatatttattggtcgtcctatgcataccgcaacaggcaatgcgctggacaattgtattccacactcctctcttttagagatgatgcggaattagtgttcatcgacattcgcgagctggtaaaaaatatgccgtgggatgatgtcaaagattgtgcagaaatcatccgttgttatataccggatgagcaaaaaaccatcagagagatttcggccatcatcggactttgtgcatatgctgctacttactggggaggtgaagaccatcccactagtaacagtctgaacgcattgtttgtgatgcttgagatgctcaattacgtggattataacatcatattccggcgtatgaattgatgagttgtacatcttgacattttcttctttcttctcttctccctttcccagaaacaaactttttttacccactataaaataaaatgagtatactacctgttatatttctttctatatttttttattcttcattcgttcagacttttaacgcgcctgaatgtatcgacaaagggcaatattttgcatcattcatggagttagaaaacgagccagtaatcttaccatgtcctcaaataaatacgctatcatccggatataatatattagatattttatgggaaaaacgaggagcggataatgatagaattataccgatagataatggtagcaatatgctaattctgaacccgacacaatcagactctggtatttatatatgcattaccacgaacgaaacctactgtgacatgatgtcgttaaatttgacaatcgtgtctgtctcagaatcaaatatagatcttatctcgtatccacaaatagtaaatgagagatctactggcgaaatggtatgtcccaatattaatgcatttattgctagtaacgtaaacgcagatattatatggagcgggcatcgacgccttagaaataagagacttaaacaacggacacctggaattattaccatagaagatgttagaaaaaatgatgctggttattatacatgtgttttagaatatatatacggtggcaaaacatataacgtaaccagaattgtaaaattagaggtacgggataaaataataccttctactatgcaattaccagatggcattgtaacttcaataggtagtaatttgactattgcatgcagagtatcgttgagacctcccacaacggatgcagacgtcttttggataagtaatggtatgtattacgaagaagatgatggggacggaaacggtagaataagtgtagcaaataaaatctatatgaccgataagagacgtgttattacatcccggttaaacattaatcctgtcaaggaagaagatgctacaacgtttacgtgtatggcgtttactattcctagcatcagtaaaacagttactgttagtataacgtgaatgtatgttgttacatttccatgtcaattgagtttataagaatttttatacattatcttccaacaagcaattgacgaacgtattgctatgattaactcccacgatactatgcatattattaatcattaacttgcagactatacctagagctattttgacatactcgtgttcttgtgtaattgcagtatctatattattaaagtacgtaaatctagctatagttttattatttaattttagataatataccgtctccttatttttaaaaattgccacatcctttattaaatcatgaatgggaatttctatgtcatagttaatatattgtgaacaacaagagcagatatctataggaaagggtggaatgcgatacattgatctatgtagttttaaaacacacgcaaactttgaagaatttatataaatcattccatcgatacatccttctatgttgagatgtatatatccaggaattcgtttattaatatcgggaaatgtataaactaaaacattgcccggaagcggagcttctaccggagttatatcagtttttaacttacaaaatgtaaccaatacctttgcatgacttgttttgttcggcaacgttagtttaaacttgacgaatggattaattacaatagcatgatccgcgcatctattaagtttttttactttaacgcccttgtatgtttttacagagactttatctaaatttctagtgcttgtatgtgttataaatataacgggatatagaactgaatcacctaccttagatacccaattacattttatcagatccagataataaacaaattttgtcgccctaactaattctatattgttatatattttacaattggttatgatatcatgtaataacttggaatctaacgcacatcgtcgtacgtttatacaattgtgatttagtgtagtatatctacacatgtatttttccgcgctatagtattctggactagtgataaaactatcgttatatctgtcttcaatgaactcatcgagatattgctctctgtcatattcatacacctgcataaactttctagacatcttacaatccgtgttattttaggatcatatttacatatttacgggtatatcaaagatgttagattagttaatgggaatcgtctataataatgaatattaaacaattatatgaggacttttaccacaaagcatcataaaaatgagtcgtcgtctgatttatgttttaaatatcaaccgcgaatcaactcataaaatacaagagaatgaaatatatacatattttagtcattgcaatatagaccatacttctacagaacttgattttgtagttaaaaactatgatctaaacagacgacaacctgtaactgggtatactgcactacactgctatttgtataataattactttacaaacgatgtactgaagatattattaaatcatggagtggatgtaacgatgaaaaccagtagcggacgtatgcctgtttatatattgcttactagatgttgcaatatttcacatgatgtagtgatagatatgatagacaaagataaaaaccacttattacatagagactattccaacctattactagagtatataaaatctcgttacatgttattaaaggaagaggatatcgatgagaacatagtatccactttattagataagggaatcgatcctaactttaaacaagacggatatacagcgttacattattattatttgtgtctcgcacacgtttataaaccaggtgagtgtagaaaaccgataacgataaaaaaggccaagcgaattatttctttgtttatacaacatggagctaatctaaacgcgttagataattgtggtaatacaccattccatttgtatcttagtattgaaatgtgtaataatattcatatgactaaaatgctgttgacttttaatccgaatttcgaaatatgtaataatcatggattaacgcctatactatgttatataacttccgactacatacaacacgatattcttgttatgttaatacatcactatgaaacaaatgttggagaaatgccgatagatgagcgtcgtataatcgtattcgagtttatcaaaacatattctacacgtcctgcagattcgataacttatttgatgaataggtttaaaaatatagatatttatacccgctatgaaggaaagacattattacacgtagcatgtgaatataataatacacacgtaatagattatcttatacgtatcaacggagatataaatgcgttaaccgacaataacaaacacgctacacaactcattatagataacaaagaaaattccccatataccattaattgtttactgtatatacttagatatattgtagataagaatgtgataagatcgttggtggatcaacttccatctctacctatcttcgatataaaatcatttgagaaattcatatcctactgtatacttttagatgacacattttacaatagacacgttaggaatcgcgattctaaaacgtatcgatacgcattttcaaaatacatgtcgtttgataaatacgatggtataataactaaatgtcataaagaaacaatattgctcaaactatccactgttctagacactacactatatgcagttttaagatgccataattcgaaaaagttaagaagatacctcaccgagttaaaaaaatataataacgataagtcctttaaaatatattctaatattatgaatgagagataccttaatgtatattataaagatatgtacgtgtcaaaggtatatgataaactatttcctgttttcacagataaaaattgtctactaacattactaccttcagaaattatatacgaaatattatacatgctgacaattaacgatctttataatatatcgtatccacctaccaaagtatagttgtatttttctcatgcgatgtgtgtaaaaaaactgatattatataaatattttagtgccgtataataaagatgacgatgaaaatgatggtacatatatatttcgtatcattattgttattgctattccacagttacgccatagacatcgaaaatgaaatcacagaattcttcaataaaatgagagatactctaccagctaaagactctaaatggttgaatccagcatgtatgttcggaggcacaatgaatgatatagccgctctaggagagccattcagcgcaaagtgtcctcctattgaagacagtcttttatcgcacagatataaagactatgtggttaaatgggaaaggctagaaaaaaatagacggcgacaggtttctaataaacgtgttaaacatggtgatttatggatagccaactatacatctaaattcagtaaccgtaggtatttgtgcaccgtaactacaaagaatggtgactgtgttcagggtatagttagatctcatattagaaaacctccttcatgcattccaaaaacatatgaactaggtactcatgataagtatggcatagacttatactgtggaattctttacgcaaaacattataataatataacttggtataaagataataaggaaattaatatcgacgacattaagtattcacaaacgggaaaggaattaattattcataatccagagttagaagatagcggaagatacgactgttacgttcattacgacgacgttagaatcaagaatgatatcgtagtatcaagatgtaaaatacttacggttataccgtcacaagaccacaggtttaaactaatactagatccaaaaatcaacgtaacgataggagaacctgccaatataacatgcactgctgtgtcaacgtcattattgattgacgatgtactgattgaatgggaaaatccatccggatggcttataggattcgattttgatgtatactctgttttaactagtagaggcggtattaccgaggcgaccttgtactttgaaaatgttactgaagaatatataggtaatacatataaatgtcgtggacacaactattattttgaaaaaacccttacaactacagtagtattggagtaaatatacaatgcatttttatatacattactgaataattattattattatttatatcgtatttgtgctataacgcgactatctaggtatttgtatctcaccgatagagaacatataaatgtagactctattaaacagttgtgtaaaatatcagatcctaatgcatgttatagatgtggatgtacggctttacatgagtacttttataattatagatcagtcaacggaaaatacaagtatagatacaacggttactatcaatattatttatctagcgattatgaaaattataatgaatattattatgatgattatgatagaactggtatgaacagtgagagtgataatatatcaatcaaaacagaatatgaattctatgatgaaacacaagatcaaagtacacaactagtaggttacgacattaaactcaaaaccaatgaggatgattttatggctatgatagatcagtgggtgtccatgattatatagatgaatcaattaataaagtagtatatggaagagagtctcacgtaagatggcgggatatatggcaagaacataatgatggcgtatacagtataggaaaggagtgcatagataatatatacgaagacaaccataccgtagacgaattctacaagatagacagcgtatcagatgtagatgacgcggaacacatatctccgataactaatgatgtatctacacaaacatgggaaaagaaatcagagttagatagatacatggaaatgtatcctcgtcatagatatagtaagcattctgtctttaagggattttctgacaaagttagaaaaaatgatttagacatgaatgtggtaaaagaattactttctaacggtgcatctctaacaattaaggatagcagtaataaggatccaataaccgtttattttcgaagaacgataatgaatttagaaatgattgatgaacgaaagtatatagtacactcctatctaaaaaattataaaaatttcgattatccatttttcaggaagttagttttgactaataaacattgtctcaacaattattataatataagcgacagcaaatatggaacaccgctacatatattggcgtctaataaaaaattaataactcctaattacatgaagttattagtgtataacggaaatgatataaacgcacgaggtgaagatacacaaatgcgaactccattacacaaatatttgtgtaaatttgtatatcataatattgaatatggtatccgatactataatgaaaagattatagacgcatttatagagttaggagccgatctaactattccaaatgacgatggaatgataccagtagtttactgtatacactcaaatgccgaatatggttataacaatattactaacataaagataatacgtaaactacttaatcttagtagacgtgcgtcacataatctatttagagatcgagtcatgcacgattatataagtaatacatatattgatcttgagtgtttagatattattagatcgttggatggattcgatatcaatggttactttgaaggacgtacaccacttcattgcgctatacaacataacttcactcagattgctaagtacttattagatcgaggagctgatatagtcgtacccaacacattgattatacatcagtacatacagtaaatagcatagatatggaggaggatacaaatatttcaaataaagttataaggtacaacactgtcaataatatatgggaaacattacctaacttctggactggaactataaatccaggcgtggtctcgcataaagatgatatatatgttgtatgcgacatcaaagatgaaaaaaatgttaaaacttgtatatttagatataacacgaatacgtataacggatgggaattggtcacgacgacagaaagcagattatcagctctgcatactattctttataacaataccataatgatgttacattgttatgaatcgtatatgttacaagatacatttaatgtgtacactcgcgaatggaatcatatgtgtcatcaacattcgaatagttatatcatgtacaatatactacccatctactaaatataatagaataaaataaatgagtatgatcattttagataacgattgattttatcattaccgcttcattcttatattctttgcttacggaacctatatttagaaacatctactaacgattttttatgcttgcattattaatggtatgtaatatgattgattgtgtacgcaataccaatttgttaagtatgaatacggggtacaaacataaactgaagtttaacattatttatttatgatatatatcgttattgtttggtctataccatggatatctttaaagaactaatcttaaaacacacggatgaaaatgttttgatttctccagtttctattttatctactttatctattctaaatcatggagcagctggttctacagctgaacaactatcaaaatatatagagaatatgaatgagaatacacccgatgacaataatgacatggacgtagatattccgtattgtgcgacactagctaccgcaaataaaatatacggtagcgatagtatcgagttccacgcctccttcctacaaaaaataaaagacgattttcaaactgtaaactttaataatgctaaccaaacaaaggaactaatcaacgaatgggttaagacaatgacaaatggtaaaattaattccttattgactagtccgctatccattaatactcgtatgacagttgttagcgccgtccattttaaagcaatgtggaaatatccattttctaaacatcttacatatacagacaagttttatatttctaagaatatagttaccagtgttgatatgatggtgagcactgagaataacttgcaatatgtacatattaatgaattattcggaggattctctattatcgatattccatacgagggaaactctagtatggtaattatactaccggacgacatagaaggtatatataacatagaaaaaaatataacagatgaaaaatttaaaaaatggtgtggtatgttatctactaaaagtatagacttgtatatgccaaagtttaaagtggaaatgacagaaccgtataatctggtaccgattttagaaaatttaggacttactaatatattcggatattatgcagattttagcaagatgtgtaatgaaactatcactgtagaaaaatttctacatacgacgtttatagatgttaatgaggagtatacagaagcatcggccgttacaggagtatttatgactaacttttcgatggtatatcgtacgaaggtctacataaaccatccattcatgtacatgattaaagacaacacaggacgtatactttttatagggaaatactgctatccgcaataaatataaacaaatagacttttatcacgtttatctatgtctaaatattacaaatagtaatagtataaactaaagctgataatacttaaaaaaataataatatcatttacaattaatagtataaactaaaaattaaacaaatcgttattataagtaatatcaaaatgatgatatacggattaatagcgtgtcttatattcgtgacttcatccatcgctagtccactttatattcccgttattccacccatttcggaagataaatcgttcaatagtgtagaggtattagtttccttgtttagagatgaccaaaaagactatacggtaacttctcagttcaataactacactatcgataccaaagactggactatcggcgtactatccacacctgatggtttggatataccattgactaatataacttattggtcacggtttactataggtcgtgcattgttcaaatcagagtctgaggatattttccaaaagaaaatgagtattctaggtgtttctatagaatgtaagaagtcgtcgacattacttacttttttgaccgtgcgtaaaatgactcgagtatttaataaatttccagatatggcttattatcgaggagactgtttaaaagccgtttatgtaacaatgacttataaaaatactaaaactggagagactgattacacgtacctctctaatggggggttgcctgcatactatcgtaatggggtcgatggttgattattgattagtatattccttattctttttattcacacaaaaagaacatttttataaacatgaaaccactgtctaaatgtaattatgatcttgatttatagatgaagatcagcctttagaggattttaaccagtatgtttaatatgaaaaaaataaacataacatattttgagattaagcgctattgtgcaagattatattagaatcaaattaatctttcatacgagaaaaataacgacatacgtcgtcaacaaattaaactttttatttattagttaactagcttatagaacttgctcattgttatgtttctaaaacgggtacgacatataggacaattatccgacgcaccggtttctcttcgtgttttatgccatatattgatgcatgttatgcaaaatatatgagtacacgaatccaataaaccaaagtatctatcgttttgagtaaacaacttcatagcaaattccacattctttttctttacttactctatacacgtcctcgtatttatccagtattttgatgatatccaactcagaaatggttgttgtattattgggtgtattgggagtataggtattattagctatgtaccaatttaccaaccctcttaatattgattgaacaatcacatcggttatccaatcaataaccacattaataactaaattgtagtgtatatatagaccatatatgtttctatttttttgacagttacgtatagtttcagtaagttttgattgttgtattcctgtatctctagataagttagtcatatagtcccttccggcgatacgttttttccaagcccgaaattgattagccaaatgtgtatttatttttgtgatattgatataatatgtaatgttattaatatttcggataatgcatactgttagtcttatatcatttggttcatctatgtattgtaatattgttacatgatctatagatgatgtattgattttggcaggatcgaattccatatccgcgactaaacagtgaaaaaaatgtaaatactttttaaattttaaattagtaaaacttttttttattttttatgattccaaaaatactgaatacaaagtcctaaattataaatatggagatcatactaccacaacttattattatgcatactcagccggtgtaatagatagatatatataattctattacaccggcagacaattaccgatcggtatttgtcgttaccaacataccgtataatatgtaatatacaattccataacccattgacagttgttatacatcaaaattgcaattcttttgattacgatgttataagaatgtagttaattgatgtatgatgttaatgtgtcctctttcctcttataacatcgtaatcaaaaacttttttataatatatacctaataatgtgtcttaatagttctcgtgattcgtcaaacaatcattcttataaaatataataaagcaacgtaaaacacataaaaataagcgtaactaataagacaatggatatttacgacgataaaggtctacagactattaaactgtttaataatgaatttgattgtataaggaatgacatcagagaattatttaaacatgtaactgattccgatagtatacaacttccgatggaagacaattctgatattatagaaaatatcagaaaaatactatatagacgattaaaaaatgtagaatgtgttgacatcgatagtacaataacttttatgaaatacgatccaaatgatgataataagcgtacgtgttctaattgggtacccttaactaataactatatggaatattgtctagtaatatatttggaaacaccgatatgtggaggcaaaataaaattataccaccctacaggaaatataaagtcggataaggatattatgtttgcaaagactctagactttaaatcaaagaaagtgttaactggacgtaaaacaattgccgttctagacatatccgtttcatataatagatcaatgactactattcactacaacgacgacgttgatatagatatacatactgataaaaatggaaaagagttatgttattgttatataacaatagatgatcattacttggttgatgtggaaactataggagttatagtcaatagatctggaaaatgtctgttagtaaataaccatctaggtataggtatcgttaaagataaacgtataagcgatagttttggagatgtatgtatggatacaatatttgacttttctgaagcacgagagttattttcattaactaatgatgataacaggaatatagcatgggacactgataaactagacgatgatacagatatatggactcccgtcacagaagatgattacaaatttctttctagactagtattgtatgcaaaatctcaatcggatactgtattcgactattatgttcttactggtgatacggaaccacccactgtattcattttcaaggtaactagattttactttaatatgccgaaataaaaaatttttgtataatatctagaggtagaggtattgtttagataaatacaaataacatagatacatcgcatacttagcatttttataaatatacataagacatacactttatacattttttttgtaaaaatactcataaaaaaatttataaaaattatggcacaaccatatcttgtataggtagtttagttcgtcgagtgaacctataaacagataatagacaacacgtaataataataatgcctactaatacaagcataataccgggagatgggatatatgacgttgtagtgtttgggttttctgaacgttgatagtctactaatactacatgctgacatctaatgcctgtataaccatgagagcatctacaatacataccgtcaatatctctagcgtggatacagtcaccgtgtaaacaatatccatctccctctggaccgcataatctgatagctggaatatctgttgtagcgtttgtaatttctggcgatgtcgtttcgatagcgttaccactatcggcgaatgatctgattatcatagcagcgaacaacaacatcagatatttcatcgacatttttgatggattttgtgtttatgctgtttctcagtgtgtgtttatgacaagattgggaattttatattattaattcagtaatataaactaataatatattgttaattgtgtaaataatataaaaataacaatacaatattgaatgtgttgctgttaaaaatgatcataaacacggagtttattttatatgtctcgcataaacattactaaaaaaatatattgttctgtttttctttcacatctttaattatgaaaaagtaaatcattatgagatggacgagattgtacgcatcgttcgcgacagtatgtggtacatacctaacgtatttatggacgacggtaagaatgaaggtcacgtttctgtcaacaatgtctgtcatatgtatttcacgttctttgatgtggatacatcgtctcatctgtttaagctagttattaaacactgcgatctgaataaacgaggtaactctccattacattgctatacgatgaatacacgatttaatccatctgtattaaagatattgttacaccacggcatgcgtaactttgatagcaaggatgaaaaaggacaccactatcaatcgataacaagatctttgatatactaacggacaccattgatgactttagtaaatcatccgatctattgctgtgttatcttagatataaattcaatgggagcttaaactattacgttctgtacaaaggatccgacgaggatgaactcacttctcttcattactactgtaaacacatatccacgttctacaaaagcaattattacaagttaagtcacactaagatgcgagccgagaagcgattcatctacgcgataatagattatggagcaaacattaacgcggttacacacttaccttcaacagtataccaaacatagtcctcgtgtggtgtatgctcttttatctcgaggagccgatacgaggatacgtaataatcttgattgtacacccatcatggaacgattgtgcaacaggtcatattctcataatgttactcaattggcacgaacaaaaggaagaaggacaacatctactttatctattcataaaacataatcaaggatacactctcaatatactacggtatctactagataggttcgacattcagaaagacgaatactataataccgcctttcaaaattgtaacaacaatgttgcctcatacatcggatacgacatcaaccttccgactaaagacggtattcgacttggtgtttgaaaacagaaacatcatatacaaggcggatgttgtgaatgacatcatccaccacagactgaaagtatctctacctatgattaaatcgttgttctacaagatgtctctccctacgacgattactacgtaaagaagataatagcctactgcctattaagggacgagtcattcgcggaactacatagtaaattctgtttaaacgaggactataaaagtgtatttatgaaaaatatatcattcgataagatagattccatcatcgtgacataagtcgccttaaagagattcgaatctccgacaccgacctgtatacggtatcacagctatcttaaagccatacattcagacagtcacatttcatttcccatgtacgacgatctcatagaacagtgccatctatcgatggagcgtaaaagtaaactcgtcgacaaagcactcaataaattagagtctaccatcggtcaatctagactatcgtatttgcctccggaaattatgcgcaatatcatctaaacagtatgttgtacgaaaagaaccattacaaatattatccatgatagaaagaaaatatctatatgattggagaagtaggaaacaggaacaagacgacgattactacattattaaatcatgaagtccgtattatactcgtatatattgtttctctcatgtataataataaacggaagagatatagcaccgcatgcaccatccgatggaaagtgtaaagacaacgaatacaaacgccataatttgtgtccgggaacatacgcttccagattatgcgatagcaagactaacacacaatgtacgccgtgtggttcgggtaccttcacatctcgcaataatcatttacccgcttgtctaagttgtaacggaagacgcgaccgtgtaacacgactcacaatagaatctgtgaatgctctcccggatattattgtcttctcaaaggatcatccggatgcaaggcatgtgtttcccaaacaaaatgtggaataggatacggagtatccggagacgtcatctgttctccgtgtggtctcggaacatattctcacaccgtctcttccgcagataaatgcgaacccgtacccagtaatacctttaactatatcgatgtggaaattaatctgtatccagttaacgaccactaccggtctcagcgaatccatctcaacgtcggaactaactattactatgaatcataaagactgtaatcccgtatttcgtgaggaatacttctccgtccttaataaggtagcaacttcaggtttctttacaggagaaaggtgtgcactctgaatttcgagattaaatgcaataacaaaaatttttcctccaaacagttaacgaaagcaaagaatgatgacggtatcatgccgcattcggagactgtctatctagcgtcgacatctatatactatatagtaataccaatactcaagactacgaaactgatacaatctcttatcatgtgggtaatgttctcgatgtcgatagccatatgcccggtagttgcgatatacataaactgatcactaattccaaacccacccgctttttatagtaagtttttcacccataaataataaatacaataattaatttctcgtaaaagtagaaaatatattctaatttattgcacggtaaggaagtagaatcataaagaacagtactcaatcaatagcaatcatgaaacaatatatcgtcctggcatgcatgtgcctgccagtcttcagcaatcatcctcatcctcctcctcgtgtacggaagaagaaaacaaacatcatatgggaatcgatgttattatcaaagtcacaaagcaagaccaaacaccgaccaatgataagatttgccaatccgtaacggaaattacagagtccgagtcagatccagatcccgaggtggaatcagaagatgattccacatcagtcgaggatgtagatcctcctaccacttattactccatcatcggtggaggtctgagaatgaactttggattcaccaaatgtcctcagattaaatccatctcagaatccgctgatggaaacacagtgaatgctagattgtccagcgtgtccccaggacaaggtaaggactctcccgcgatcactcatgaagaagctctggctatgatcaaagactgtgaggtgtctatcgacatcagatgtagcgaagaagagaaagacagcgacatcaagacccatccagtactcgggtctaacatctctcataagaaagtgagttacgaagatatcatcggttcaacgatcgtcgatacaaaatgtgtcaagaatctagagtttagcgttcgtatcggagacatgtgcaaggaatcatctgaacttgaggtcaaggatggatttaagtatgtcgacggatcggcatctgaaggtgcaaccgatgatacttcactcatcgattcaacaaaactcaaagcgtgtgtctgaatcgataactctattcatctgaaattggatgagtagggttaatcgaacgattcaggcacaccacgaattaaaaaagtgtaccggacactatattccggtttgcaaaacaaaaatgttcttaactacattcacaaaaagttacctctcgcgacttcttctttttctgtctcaatagtgtgatacgattatgacactattcctattcctattcctatttcctttcagggtatcacaaaaatattaaacctctttctgatggtctcataaaaaaagttttacaaaaatatttttattctctttctctctttgatggtctcataaaaaaagttttacaaaaatatttttattctctttctctctttgatggtctcataaaaaaagttttacaaaaatatttttattctctttctctctttgatggtctcataaaaaaagttttacaaaaatatttttattctctttctctctttgatggtctcataaaaaaagttttacaaaaatatttttattctctttctctctttgatggtctcataaaaaaagttttacaaaaatatttttattctctttctctctttgatggtctcataaaaaaagttttacaaaaatatttttattctctttctctctttgatggtctcataaaaaaagttttacaaaaatatttttattctctttctctctttgatggtctcataaaaaatattaaacctctttctgatggtgtcactaaaatatttttattctcattctcattttctctttctctcttcaatggagtcataaaatatttttattctctttctctcttcgatggtctcacaaaaatattaaacctctttctgatggtgtcactaaaatatttttattctcattctcattttctctttctctcttcaatggagtcataaaatatttttattctctttctctcttcgatggtctcacaaaaatattaaacctctttctgatggagtcgtaaaaaagttttatctctttctctcttcgatggtctcacaaaaatattaaacctctttctgatggagtcgtaaaaaagttttatctctttctctcttcgatggtctcacaaaaatattaaacctctttctgatggagtcgtaaaaaagttttatctctttctctcttcgatggtctcacaaaaatattaaacctctttctgatggagtcgtaaaaaagttttatctctttctctcttcgatggtctcacaaaaatattaaacctctttctgatggagtcgtaaaaaagttttatctctttctctcttcgatggtctcacaaaaatattaaacctctttctgatggagtcgtaaaaaagttttatctctttctctcttcgatggtctcacaaaaatattaaacctctttctgatggagtcgtaaaaaagttttatctctttctctcttcgatggtctcacaaaaatattaaacctctttctgatggagtcgtaaaaaagttttatctctttctctcttcgatggtctcacaaaaatattaaacctctttctgatggagtcgtaaaaaagttttatctctttctctcttcgatggtctcacaaaaatattaaacctctttctgatggagtcgtaaaaaagttttatctctttctctcttcgatggtctcacaaaaatattaaacctctttctgatggagtcgtaaaaaagttttatctctttctctcttcgatggtctcacaaaaatattaaacctctttctgatggagtcgtaaaaaagttttatctctttctctcttcgatggtctcacaaaaatattaaacctctttctgatggagtcgtaaaaaagttttatctctttctctcttcgatggtctcacaaaaatattaaacctctttctgatggagtcgtaaaaaagttttatctctttctctcttcgatggtctcacaaaaatattaaacctctttctgatggagtcgtaaaaaagttttatctctttctctcttcgatggtctcacaaaaatattaaacctctttctgatggagtcgtaaaaaagttttatctctttctctcttcgatggtctcacaaaaatattaaacctctttctgatggagtcgtaaaaaagttttatctctttctctcttcgatggtctcacaaaaatattaaacctctttctgatggagtcgtaaaaaagttttatctctttctctcttcgatggtctcactaaaatattttttattctctttctgatgcatcaactatttcttaaacaataacgtccaacaacatatactcgtcgagcttatcaacatcccctatgcccatctaggttaccagacaattgtatatcataaaataatgtttataatttacacgttaaaatcatataataaaacgtagatcgtataatattttttggtatataaatgatctagtaaaatccatgtaggggatactgctcacattttttctttggtacaaaatttcacacaagtttttatacagacaaattcttgtccatatattttaaaacattgacttttgtactaagaaaaatatctagatcaactatctctttctctttctctcttcgatggtctcacaaaaatattaaacctctttctgatggagtcgtaaaaaagttttatctctttctctcttcgatggtctcacaaaaatattaaacctctttctgatggagtcgtaaaaaagttttatctctttctctcttcgatggtctcacaaaaatattaaacctctttctgatggagtcgtaaaaaagttttatctctttctctcttcgatggtctcacaaaaatattaaacctctttctgatggagtcgtaaaaaagttttatctctttctctcttcgatggtctcacaaaaatattaaacctctttctgatggagtcgtaaaaaagttttatctctttctctcttcgatggtctcacaaaaatattaaacctctttctgatggagtcgtaaaaaagttttatctctttctccttcgatggtctcacaaaaatattaaacctctttctgatggagtcgtaaaaaagttttatctctttctctcttcgatggtctcacaaaaatattaaacctctttctgatggagtcgtaaaaaagttttatctctttctctcttcgatggtctcacaaaaatattaaacctctttctgatggagtcgtaaaaaagttttatctctttctccttcgatggtctcacaaaaatattaaacctctttctgatggagtcgtaaaaaagttttatctctttctccttcgatggtctcacaaaaatattaaacctctttctgatggagtcgtaaaaaagttttatctctttctctcttcgatggtctcacaaaaatattaaacctctttctgatggagtcgtaaaaaagttttatctctttctctcttcgatggtctcacaaaaatattaaacctctttctgatggtctctataaagcgatcgatctttcttacactctagagtttcctacagtcatgggtcacacatttttttctagacactaaataaaattagtaaaattaaattaattataaaattatatatataatttactaactttagttagataaattaataatatataagttttagtacattaatattatattttaaat

SEQ ID NO: 204 - DNA, 198898 bp, Artificial Sequence
  GLV-0b406
atttaaaatataatattaatgtactaaaacttatatattattaatttatctaactaaagttagtaaattatatatataattttataattaatttaattttactaattttatttagtgtctagaaaaaaatgtgtgacccatgactgtaggaaactctagagtgtaagaaagatcgatcgctttatagagaccatcagaaagaggtttaatatttttgtgagaccatcgaagagagaaagagataaaacttttttacgactccatcagaaagaggtttaatatttttgtgagaccatcgaagagagaaagagataaaacttttttacgactccatcagaaagaggtttaatatttttgtgagaccatcgaaggagaaagagataaaacttttttacgactccatcagaaagaggtttaatatttttgtgagaccatcgaaggagaaagagataaaacttttttacgactccatcagaaagaggtttaatatttttgtgagaccatcgaagagagaaagagataaaacttttttacgactccatcagaaagaggtttaatatttttgtgagaccatcgaagagagaaagagataaaacttttttacgactccatcagaaagaggtttaatatttttgtgagaccatcgaaggagaaagagataaaacttttttacgactccatcagaaagaggtttaatatttttgtgagaccatcgaagagagaaagagataaaacttttttacgactccatcagaaagaggtttaatatttttgtgagaccatcgaagagagaaagagataaaacttttttacgactccatcagaaagaggtttaatatttttgtgagaccatcgaagagagaaagagataaaacttttttacgactccatcagaaagaggtttaatatttttgtgagaccatcgaagagagaaagagataaaacttttttacgactccatcagaaagaggtttaatatttttgtgagaccatcgaagagagaaagagataaaacttttttacgactccatcagaaagaggtttaatatttttgtgagaccatcgaagagagaaagagaaagagatagttgatctagatatttttcttagtacaaaagtcaatgttttaaaatatatggacaagaatttgtctgtataaaaacttgtgtgaaattttgtaccaaagaaaaaatgtgagcagtatcccctacatggattttactagatcatttatataccaaaaaatattatacgatctacgttttattatatgattttaacgtgtaaattataaacattattttatgatatacaattgtctggtaacctagatgggcataggggatgttgataagctcgacgagtatatgttgttggacgttattgtttaagaaatagttgatgcatcagaaagagaataaaaaatattttagtgagaccatcgaagagagaaagagataaaacttttttacgactccatcagaaagaggtttaatatttttgtgagaccatcgaagagagaaagagataaaacttttttacgactccatcagaaagaggtttaatatttttgtgagaccatcgaagagagaaagagataaaacttttttacgactccatcagaaagaggtttaatatttttgtgagaccatcgaagagagaaagagataaaacttttttacgactccatcagaaagaggtttaatatttttgtgagaccatcgaagagagaaagagataaaacttttttacgactccatcagaaagaggtttaatatttttgtgagaccatcgaagagagaaagagataaaacttttttacgactccatcagaaagaggtttaatatttttgtgagaccatcgaagagagaaagagataaaacttttttacgactccatcagaaagaggtttaatatttttgtgagaccatcgaagagagaaagagataaaacttttttacgactccatcagaaagaggtttaatatttttgtgagaccatcgaagagagaaagagataaaacttttttacgactccatcagaaagaggtttaatatttttgtgagaccatcgaagagagaaagagataaaacttttttacgactccatcagaaagaggtttaatatttttgtgagaccatcgaagagagaaagagataaaacttttttacgactccatcagaaagaggtttaatatttttgtgagaccatcgaagagagaaagagataaaacttttttacgactccatcagaaagaggtttaatatttttgtgagaccatcgaagagagaaagagataaaacttttttacgactccatcagaaagaggtttaatatttttgtgagaccatcgaagagagaaagagataaaacttttttacgactccatcagaaagaggtttaatatttttgtgagaccatcgaagagagaaagagataaaacttttttacgactccatcagaaagaggtttaatatttttgtgagaccatcgaagagagaaagagataaaacttttttacgactccatcagaaagaggtttaatatttttgtgagaccatcgaagagagaaagagataaaacttttttacgactccatcagaaagaggtttaatatttttgtgagaccatcgaagagagaaagagataaaacttttttacgactccatcagaaagaggtttaatatttttgtgagaccatcgaagagagaaagagaataaaaatattttatgactccattgaagagagaaagagaaaatgagaatgagaataaaaatattttagtgacaccatcagaaagaggtttaatatttttgtgagaccatcgaagagagaaagagaataaaaatattttatgactccattgaagagagaaagagaaaatgagaatgagaataaaaatattttagtgacaccatcagaaagaggtttaatattttttatgagaccatcaaagagagaaagagaataaaaatatttttgtaaaactttttttatgagaccatcaaagagagaaagagaataaaaatatttttgtaaaactttttttatgagaccatcaaagagagaaagagaataaaaatatttttgtaaaactttttttatgagaccatcaaagagagaaagagaataaaaatatttttgtaaaactttttttatgagaccatcaaagagagaaagagaataaaaatatttttgtaaaactttttttatgagaccatcaaagagagaaagagaataaaaatatttttgtaaaactttttttatgagaccatcaaagagagaaagagaataaaaatatttttgtaaaactttttttatgagaccatcaaagagagaaagagaataaaaatatttttgtaaaactttttttatgagaccatcagaaagaggtttaatatttttgtgataccctgaaaggaaataggaataggaataggaatagtgtcataatcgtatcacactattgagacagaaaaagaagaagtcgcgagaggtaactttttgtgaatgtagttaagaacatttttgttttgcaaaccggaatatagtgtccggtacacttttttaattcgtggtgtgcctgaatcgttcgattaaccctactcatccaatttcagatgaatagagttatcgattcagacacacgctttgagttttgttgaatcgatgagtgaagtatcatcggttgcaccttcagatgccgatccgtcgacatacttaaatccatccttgacctcaagttcagatgattccttgcacatgtctccgatacgaacgctaaactctagattcttgacacattttgtatcgacgatcgttgaaccgatgatatcttcgtaactcactttcttatgagagatgttagacccgagtactggatgggtcttgatgtcgctgtctttctcttcttcgctacatctgatgtcgatagacacctcacagtctttgatcatagccagagcttcttcatgagtgatcgcgggagagtccttaccttgtcctggggacacgctggacaatctagcattcactgtgtttccatcagcggattctgagatggatttaatctgaggacatttggtgaatccaaagttcattctcagacctccaccgatgatggagtaataagtggtaggaggatctacatcctcgactgatgtggaatcatcttctgattccacctcgggatctggatctgactcggactctgtaatttccgttacggattggcaaatcttatcattggtcggtgtttggtcttgctttgtgactttgataataacatcgattcccatatgatgtttgttttcttcttccgtacacgaggaggaggatgaggatgattgctgaagactggcaggcacatgcatgccaggacgatatattgtttcatgattgctattgattgagtactgttctttatgattctacttccttaccgtgcaataaattagaatatattttctacttttacgagaaattaattattgtatttattatttatgggtgaaaaacttactataaaaagcgggtgggtttggaattagtgatcagtttatgtatatcgcaactaccgggcatatggctatcgacatcgagaacattacccacatgataagagattgtatcagtttcgtagtcttgagtattggtattactatatagtatatagatgtcgacgctagatagacagtctccgaatgcggcatgataccgtcatcattctttgctttcgttaactgtttggaggaaaaatttttgttattgcatttaatctcgaaattcagagtgcacacctttctcctgtaaagaaacctgaagttgctaccttattaaggacggagaagtattcctcacgaaatacgggattacagtctttatgattcatagtaatagttagttccgacgttgagatggattcgctgagaccggtagtggtcgttaactggatacagattaatttccacatcgatatagttaaaggtattactgggtacgggttcgcatttatctgcggaagagacggtgtgagaatatgttccgagaccacacggagaacagatgacgtctccggatactccgtatcctattccacattttgtttgggaaacacatgccttgcatccggatgatcctttgagaagacaataatatccgggagagcattcacagattctattgtgagtcgtgttacacggtcgcgtcttccgttacaacttagacaagcgggtaaatgattattgcgagatgtgaaggtacccgaaccacacggcgtacattgtgtgttagtcttgctatcgcataatctggaagcgtatgttcccggacacaaattatggcgtttgtattcgttgtctttacactttccatcggatggtgcatgcggtgctatatctcttccgtttattattatacatgagagaaacaatatatacgagtataatacggacttcatgatttaataatgtagtaatcgtcgtcttgttcctgtttcctacttctccaatcatatagatattttctttctatcatggataatatttgtaatggttcttttcgtacaacatactgtttagatgatattgcgcataatttccggaggcaaatacgatagtctagattgaccgatggtagactctaatttattgagtgctttgtcgacgagtttacttttacgctccatcgatagatggcactgttctatgagatcgtcgtacatgggaaatgaaatgtgactgtctgaatgtatggctttaagatagctgtgataccgtatacaggtcggtgtcggagattcgaatctctttaaggcgacttatgtcacgatgatggaatctatcttatcgaatgatatatttttcataaatacacttttatagtcctcgtttaaacagaatttactatgtagttccgcgaatgactcgtcccttaataggcagtaggctattatcttctttacgtagtaatcgtcgtagggagagacatcttgtagaacaacgatttaatcataggtagagatactttcagtctgtggtggatgatgtcattcacaacatccgccttgtatatgatgtttctgttttcaaacaccaagtcgaataccgtctttagtcggaaggttgatgtcgtatccgatgtatgaggcaacattgttgttacaattttgaaaggcggtattatagtattcgtctttctgaatgtcgaacctatctagtagataccgtagtatattgagagtgtatccttgattatgttttatgaatagataaagtagatgttgtccttcttccttttgttcgtgccaattgagtaacattatgagaatatgacctgttgcacaatcgttccatgatgggtgtacaatcaagattattacgtatcctcgtatcggctcctcgagataaaagagcatacaccacacgaggactatgtttggtatactgttgaaggtaagtgtgtaaccgcgttaatgtttgctccataatctattatcgcgtagatgaatcgcttctcggctcgcatcttagtgtgacttaacttgtaataattgcttttgtagaacgtggatatgtgtttacagtagtaatgaagagaagtgagttcatcctcgtcggatcctttgtacagaacgtaatagtttaagctcccattgaatttatatctaagataacacagcaatagatcggatgatttactaaagtcatcaatggtgtccgttagtatatcaaagatcttgttatcgattgatagtggtgtcctttttcatccttgctatcaaagttacgcatgccgtggtgtaacaatatctttaatacagatggattaaatcgtgtattcatcgtatagcaatgtaatggagagttacctcgtttattcagatcgcagtgtttaataactagcttaaacagatgagacgatgtatccacatcaaagaacgtgaaatacatatgacagacattgttgacagaaacgtgaccttcattcttaccgtcgtccataaatacgttaggtatgtaccacatactgtcgcgaacgatgcgtacaatctcgtccatctcataatgatttactttttcataattaaagatgtgaaagaaaaacagaacaatatatttttttagtaatgtttatgcgagacatataaaataaactccgtgtttatgatcatttttaacagcaacacattcaatattgtattgttatttttatattatttacacaattaacaatatattattagtttatattactgaattaataatataaaattcccaatcttgtcataaacacacactgagaaacagcataaacacaaaatccatcaaaaatgtcgatgaaatatctgatgttgttgttcgctgctatgataatcagatcattcgccgatagtggtaacgctatcgaaacgacatcgccagaaattacaaacgctacaacagatattccagctatcagattatgcggtccagagggagatggatattgtttacacggtgactgtatccacgctagagatattgacggtatgtattgtagatgctctcatggttatacaggcattagatgtcagcatgtagtattagtagactatcaacgttcagaaaacccaaacactacaacgtcatatatcccatctcccggtattatgcttgtattagtaggcattattattattacgtgttgtctattatctgtttataggttcactcgacgaactaaactacctatacaagatatggttgtgccataatttttataaatttttttatgagtatttttacaaaaaaaatgtataaagtgtatgtcttatgtatatttataaaaatgctaagtatgcgatgtatctatgttatttgtatttatctaaacaatacctctacctctagatattatacaaaaattttttatttcggcatattaaagtaaaatctagttaccttgaaaatgaatacagtgggtggttccgtatcaccagtaagaacataatagtcgaatacagtatccgattgagattttgcatacaatactagtctagaaagaaatttgtaatcatcttctgtgacgggagtccatatatctgtatcatcgtctagtttatcagtgtcccatgctatattcctgttatcatcattagttaatgaaaataactctcgtgcttcagaaaagtcaaatattgtatccatacatacatctccaaaactatcgcttatacgtttatctttaacgatacctatacctagatggttatttactaacagacattttccagatctattgactataactcctatagtttccacatcaaccaagtaatgatcatctattgttatataacaataacataactcttttccatttttatcagtatgtatatctatatcaacgtcgtcgttgtagtgaatagtagtcattgatctattatatgaaacggatatgtctagaacggcaattgttttacgtccagttaacactttctttgatttaaagtctagagtctttgcaaacataatatccttatccgactttatatttcctgtagggtggtataattttattttgcctccacatatcggtgtttccaaatatattactagacaatattccatatagttattagttaagggtacccaattagaacacgtacgcttattatcatcatttggatcgtatttcataaaagttattgtactatcgatgtcaacacattctacattttttaatcgtctatatagtatttttctgatattttctataatatcagaattgtcttccatcggaagttgtatactatcggaatcagttacatgtttaaataattctctgatgtcattccttatacaatcaaattcattattaaacagtttaatagtctgtagacctttatcgtcgtaaatatccattgtcttattagttacgcttatttttatgtgttttacgttgctttattatattttataagaatgattgtttgacgaatcacgagaactattaagacacattattaggtatatattataaaaaagtttttgattacgatgttataagaggaaagaggacacattaacatcatacatcaattaactacattcttataacatcgtaatcaaaagaattgcaattttgatgtataacaactgtcaatgggttatggaattgtatattacatattatacggtatgttggtaacgacaaataccgatcggtaattgtctgccggtgtaatagaattatatatatctatctattacaccggctgagtatgcataataataagttgtggtagtatgatctccatatttataatttaggactttgtattcagtatttttggaatcataaaaaataaaaaaaagttttactaatttaaaatttaaaaagtatttacatttttttcactgtttagtcgcggatatggaattcgatcctgccaaaatcaatacatcatctatagatcatgtaacaatattacaatacatagatgaaccaaatgatataagactaacagtatgcattatccgaaatattaataacattacatattatatcaatatcacaaaaataaatacacatttggctaatcaatttcgggcttggaaaaaacgtatcgccggaagggactatatgactaacttatctagagatacaggaatacaacaatcaaaacttactgaaactatacgtaactgtcaaaaaaatagaaacatatatggtctatatatacactacaatttagttattaatgtggttattgattggataaccgatgtgattgttcaatcaatattaagagggttggtaaattggtacatagctaataatacctatacacccaataatacaacaaccatttctgagttggatatcatcaaaatactggataaatacgaggacgtgtatagagtaagtaaagaaaaagaatgtggaatttgctatgaagttgtttactcaaaacgatagatactttggtttattggattcgtgtactcatatattttgcataacatgcatcaatatatggcataaaacacgaagagaaaccggtgcgtcggataattgtcctatatgtcgtacccgttttagaaacataacaatgagcaagttctataagctagttaactaataaataaaaagtttaatttgttgacgacgtatgtcgttatttttctcgtatgaaagattaaattcaattcaattcgttgtttctaatataatctgccgtattggatggattctcaagacaattgcatttagattatattatcatgaataaaaatagtagcacgcactacttcagccaaatattcttttttgaaacgccatctatcgtagtgaggacacaagtgaacctataattatcaaatttattagtatcagtcacatgaaggactttctgtagagtgacgattctaccatctatggtactaacggtttcatcctccttgataccctcacccaaatgttctataaatttagcatcctcgtccgatctcatatcctttgccaaccaatacatgtagctaaaattaggcataaatttcacacatccagtgcaacgaaattctccagaagatgttacgatgtttaggttaggacatttgatttcgtcggcattaacatatgggtgaacacacccatacatgaaagcgatgagaaataggattctcatcttgccaaaatatcactagaaaaaatttatttatcaattttaaaggtataaaaaatacttattgttgctcgaatattttgtatttgatggtatacggaagattagaaatgtaggtattatcatcaactgattctatggttttatgtattctatcatgtttcactattgcgtcggaaataatatcatatgcttccacatatattttattttgttttaactcataatactcacgtaattctggattattggcatatctatgaataattttagctccatgatcagtaaatattaatgagaacatagtattaccacctaccattatttttttcatttcgttcaattcttgattgcaaagatctatataatcattatagcgttgacttatggactctggaatcttagacgatgtacagtcatctataatcatggcatatttaatacattgttttatagcatagtagttatctacgatgttagatatttctctcaatgaatcaatcacacaatctaatgtaggtttatgacataatagcattttcagcagttcaatgtttctagattcgttgatggcaatggctatacatgtatatccgttatttgatctaatgttgacatctgaaccggattctagcagtaaagatactagagattgtttattatatctaacagccttgtgaagaagtgtttctcctcgtttgtcaatcatgttaatgtctttaagataaggtaggcaaatgtttatagtactaagaattgggcaagcataagacatgtcacaaagaccctttttgtatgtataagtgtaaaaattataacattcatagttggatttacataggtgtccaatcgggatctctccatcatcgagataattgatggcatctcccttccttttttagtagatatttcatcgtgtaagaatcaatattaatatttctaaagtattcgtgtatagcctctttatttaccacagttccatattccactagagggatatcgccgaatgtcatatactcaattagtatatgttggaggacatccgagttcattgttttcaatatcaaaaagatggtttccttatcatttctccatagtggtacaatactacacattattccgtgcggctttccattttccaaaaacaatttgaccaaatctaaatctacatctttattgtatctataatcactatttagataatcagccataattactcgagtgcaacatgttagatcgtctatatatgaataagcagtgttatctattcctttcattaacaatttaacgatgtctatatctatatgagatgacttaatataatattgaagagctgtacaatagtttttatctatagaagacggcttgattccgtgattaattagacatttaacaacttccggacgcacatatgctctcgtatccgactttgaatacagatgagagatgatatacagatgcaatacggtaccgcaatttcgtagttgataatcatcatacgcgtatcagtactcgtcctcataaagaacactgcagccattttctatgaacaaatcaataattttaggaacaggatcattgtcattacataattttctataactgaacgatggttttcacatttaacactcaagtcaaatccatgttctaccaacacctttatcaagtcaacgtctacatttttggatttcatatagctgaatatattaaagtcatttatgttgctaaatccagtggcttctagtagagccatcgctatatcctttaactttaacatgtctactatttgtgtattcttctaatggggtagctgtctccaatttttgcgtaatggattagtgccactgtctagtagtagtttgacgacctcgacattattacaatgctcattaaaaaggtatgcgtgtaaagcattattcttgaattggttcctggtatcattaggatctctgtctctcaacatctgtttaagttcatcgagagccacctcctcattttccagatagtcaaacattttgactgaatgagctactgtgaactctatacacccacacaactaatgtcattaaatattatttttttgaatgtatttataccatgtcaaaaacttgtacaattattaataaaaataatttagtgtttaaattttaccagttccagattttacacctccgttaaccccactttttacaccactggacgatcctcctccccacattccaccgccaccagatgtataagttttagatcctttattactaccatcatgtccatggataaagacactccacatgccgccactactaccccctttagaagacatattaataagacttaaggacaagtttaacaataaaattaatcacgagtaccctactaccaacctacactattatatgattatagtttctatttttacagtaccttaactaaagtctctagtcacaagagcaatactaccaacctacactattatatgattatagtttctatttttataggaacgcgtacgagaaaatcaaatgtctaatttctaacggtagtgttgataaacgattatcgtcaatggatacctcctctatcatgtcgtctattttcttactttgttctattaacttattagcattatatattatttgattataaaacttatattgcttattagcccaatctgtaaatatcggattattaacatatcgtttctttgtaggtttatttaacatgtacatcactgtaagcatgtccgtaccatttattttaatttgacgcatatccgcaatttctttttcgcagtcggttataaattctatatatgatggatacatgctacatgtgtacttataatcgactaatatgaagtacttgatacatattttcagtaacgatttattattaccacctatgaataagtacctgtgatcgtctaggtaatcaactgttttcttaatacattcgatggttggtaatttactcagaataatttccaatatcttaatatataattctgctatttctgggatatatttatctgccagtataacacaaatagtaatacatgtaaacccatattttgttattatattaatgtctgcgccattatctattaaccattctactaggctgacactatgcgacttaatacaatgataaagtatactacatccatgtttatctattttgtttatatcatcaatatacggcttacaaagttttagtatcgataacacatccaactcacgcatagagaaggtagggaataatggcataatatttattaggttatcatcattgtcattatctacaactaagtttccattttttaaaatatactcgacaactttaggatctctattgccaaatttttgaaaatatttatttatatgcttaaatctatataatgtagctccttcatcaatcatacatttaataacattgatgtatactgtatgataagatacatattctaacaatagatcttgtatagaatctgtatatcttttaagaattgtggatattaggatattattacgtaaactattacacaattctaaaatataaaacgtatcacggtcgaataatagttgatcaactatataattatcgattttgtgatttttcttcctaaactgtttacgtaaatagttagatagaatattcattagttcatgaccactatagttactatcgaataacgcgtcaaatatttcccgtttaatatcgcatttgtcaagataataatagagtgtggtatgttcacgataagtataataacgcatctcttttttgtgtgaaattaaatagtttatcacgtccaaagatgtagcataaccatcttgtgacctagtaataatataataatagagaactgttttacccattctatcatcataatcagtggtgtagtcgtaatcgtaatcgtctaattcatcatcccaattataatattcaccagcacgtctaatctgttctattttgatcttgtatccatactgtatgttgctacatgtaggtattcctttatccaataatagtttaaacacatctacattgggatttgatgttgtagcgtatttctctacaatattaataccatttttgatactatttatttctatacctttcgaaattagtaatttcaataagtctatatcgatgttatcagaacatagatattcgaatatatcaaaatcattgatatttttatagtcgactgacgacaataacaaaatcacaacatcgtttttgatattattatttttcttggtaacgtatgcctttaatggagtttcaccatcatactcatataatggatttgcaccactttctatcaatgattgtgcactgctggcatcgatgttaaatgttttacaactatcatagagtatcttatcgttaaccatgattggttgttgatgctatcgcattttttggtttctttcatttcagttatgtatggatttagcacgtttgggaagcatgagctcatatgatttcagtactgtagtgtcagtactattagtttcgatcagatcaatgtctagatctatagaatcaaaacacgataggtcagaagataatgaatatctgtacgcttctttttgtactgtaacttctggttttgttagatggttgcatcgtgctttaacatcaatggtacaaattttatcctcgctttgtgtatcatattcgtctctagtataaaattctatattcagattatcatgcgatgtgtatacgctaacggtatcaataaacggagcacaccatttagtcataacagtaatccaaaattttttaaagtatatcttaacgaaagaagttgtgtcattgtctacggtgtatggtactagatcctcataagtgtatatatctagagtaatgtttaatttattaaatggttgataatatggatcctcatgacaatttccgaagatggaaatgagatatagacatgcaataaatctaatcgaagacatggttactccttaaaaaaatacgaataatcaccttggctatttagtaagtgtcatttaacactatactcatattaatccatggactcataatctctatacgggattaacggatgttctatatacggggatgagtagttttcttctttaactttatactttttactaatcatatttagactgatgtatgggtaatagtgtttaaagagttcgttctcatcatcagaataaatcaatatctctgtttttttgttatacagatgtattacagcctcatatattacgtaatagaacgtgtcatctaccttattaactttcaccgcatagttgtttgcaaatacggttaatcctttgacctcgtcgatttccgaccaatctgggcgtataatgaatctaaactttaatttcttgtaatcattcgaaataatttttagtttgcatccgtagttatcccctttatgtaactgtaaatttctcaacgcgatatctccattaataatgatgtcgaattcgtgctgtatacccatactgaatggatgaactaacgaatatcaacggcgttaatagtaatttactttttcatctttacatattgggtactagttttactatcataagtttataaattccacaagctactatggaataagccaaccatcttagtataccacacatgtcttaaagtttattaattaattacatgttgttttatatatatcgctacgaatttaaagagaaatcagtttaggaagaaaaaaattatctatctacatcatcacgtctctgtattctacgatagagtgctactttaagatgagacatatccgtgtcatcaaaaatatactccattaaaatgattattccggcagcgaacttgatattggatatatcacaacctttgttaatatctacgacaatagacagcagtcccatggttccataaacagtgagtttatctttctttgaagcgatagtttgtagagatcttataaaaccgtcaaacgacatcgcatttatatctttagctaattcatatatgttaccatcgtaatatctaaccgcgtctatcttaaacgtttccatcgctttaaagacgtttccgatagatggtctcatttcatcagtcatactgagccaacaaatataatcgtgtataacatctttgatagaatcagactctaaagaaaacgaatcggctttattatacgcattcatgataaacttaatgaaaaatgtttttcgttgtttaagttggatgaatagtatgtcttaataattgttattatttcattaattaatatttagtaacgagtacactctataaaaacgagaatgacataactagttatcaaagtgtctaggacgcgtaattttcatatggtatagatcctgtaagcattgtctgtattctggagctattttctttatcgcattagtaagttcagaatatgttataaatttaaatcgaataacgaacatgactttagtaaagtcgtctatattaactcttttattttctagccatcgtaataccatgtttaagatagtatattctctagttactacgatctcatcgttgtctagaatatcacatactgaatctacatccaattttagaaattggtctgtgttacatatctcttctatattattgttgatgtattgtcgtagaaaactattacgtagaccattttctttataaaacgaatatatagtactccaattatctttaccgatatatttgcacacataatccattctctcaatcactacatctttaagattttcgttgttaagatatttggctaaactatataattctattagatcatcaacagaatcagtatatatttttctagatccaaagacgaactctttggcgtcctctataatattcccagaaaagatattttcgtgttttagtttatcgagatctgatctgttcatatacgccatgattgtacggtacgttatgataaccgcataaaataaaaatccattttcatttttaaccaatactattcataattgagattgatgtaatactttgttactttgaacgtaaagacagtacacggatccgtatctccaacaagcacgtagtaatcaaatttggtgttgttaaacttcgcaatattcatcaatttagatagaaacttatactcatcatctgttttaggaatccatgtattattaccactttccaacttatcattatcccaggctatgtttcgtccatcatcgttgcgcagagtgaataattcttttgtattcggtagttcaaatatatgatccatgcatagatcggcaaagctattgtagatgtgatttttcctaaatctaatataaaactcgtttactagcaaacactttcctgatttatcgaccaagacacatatggtttctaaatctatcaagtggtggggatccatagttatgacgcagtaacatagattattacattcttgactgtcgctaatatctaaatatttattgttatcgtattggattctgcatatagatggcttgtatgtcaaagatatagaacacataaccaatttatagtcgcgctttacattctcgaatctaaagttaagagatttagaaaacattatatcctcggatgatgttatcactgtttctggagtaggatatattaaagtctttacagatttcgtccgattcaaataaatcactaaataatatcccacattatcatctgttagagtagtatcattaaatctattatattttatgaaagatatatcactgctcacctctatatttcgtacatttttaaactgtttgtataatatctctctgatacaatcagatatatctattgtgtcggtagacgataccgttacatttgaattaatggtgttccattttacaacttttaacaagttgaccaattcatttctaatagtatcaaactctccatgattaaatattttaatagtatccattttatatcactacggacacaaagtagctgacataaaccattgtataatttttatgttttatgtttattagcgtacacattttggaagttccggcttccatgtatttcctggagagcaagtagatgatgaggaaccagatagtttatatccgtacttgcacttaaagtctacattgtcgttgtatgagtatgatcttttaaacccgctagacaagtatccgtttgatattgtaggatgtggacatttaacaatctgacacgtgggtggatcggaccattctcctcctgaacacaggacaccagagttaccaatcaacgaatatccactattgcaactataagttacaacgctcccatcggtataaaaatcctcgtatccgttatgtcttccgttggatatagatggaggggattggcatttaacagattcacaaataggtgcctcgggattccataccatagatccagtagatcctaattcacaatacgatttagattcaccgatcaaatgatatccgctattacaagagtacgttatactagagccaaagtctactccaccaatatcaagttggccattatcgatatctcgaggcgatgggcatctccgtttaatacattgattaaagagtgtccatccagtacctgtacatttagcatatataggtcccattttttgctttctgtatccaggtagacatagatattctatagtgtctcctatgttgtaattagcattagcatcagtctccacactattcttaaatttcatattaatgggtcgtgacggaatagtacagcatgatagaacgcatcctattcccaacaatgtcaggaacgtcacgctctccaccttcatatttatttatccgtaaaaatgttatcctggacatcgtacaaataataaaaagcccatatatgttcgctattgtagaaattgtttttcacagttgctcaaaaacgatggcagtgacttatgagttacgttacactttggagtctcatctttagtaaacatatcataatattcgatattacgagttgacatatcgaacaaattccaagtatttgattttggataatattcgtattttgcatctgctataattaagatataatcaccgcaagaacacacgaacatctttcctacatggttaaagtacatgtataattctatccatttgtcttccttaactatatatttgtatagataattacgagtctcgtgagtaattccagtaattacatagatgtcgccgtcgtactctacagcataaactatactatgatgtctaggcatgggagacttttttatccaacgatttttagtgaaacattccacatcgtttaatactacatatttttcatacgtggtataaactccacccattacatatatatcatcgtttacgaataccgacgcgcctgaatatctaggagtaattaagtttggaagtcttatccatttcgaagtgccgtgtttcaaatattctgccacacccgttgaaatagaaaattctaatcctcctattacatataactttccatcgttaacacaagtactaacttctgattttaacgacgacatattagtaaccgttttccattttttcgtttcaagatctacccgcgatacggaataaacatgtctattgttaatcatgccgccaataatgtatagacaattatgtaaaacatttgcattatagaattgtctatctgtattaccgactatcgtccaatattctgttctaggagagtaatgggttattgtggatatataatcagagtttttaatgactactatattatgttttataccatttcgtgtcactggctttgtagatttggatatagttaatcccaacaatgatatagcattgcgcatagtattagtcataaacttgggatgtaaaatgttgatgatatctacatcgtttggatttttatgtatccactttaataatatcatagctgtaacatcctcatgatttacgttaacgttttcgtgggataagatagttgtcagttcatcctttgataattttccaaattctggatcggatgtcaccgcagtaatattgttgattatttctgacatcgacgcattatatagttttttaattccatatcttttagaaaagttaaacatccttatacaatttgtggaattaatattatgaatcatagtttttacacatagatctactacaggcggaacatcaattattatggcagcaactagtatcatttctacattgtttatggtgatgtttatcttcttccagcgtatatagtctaatagcgattcaaacgcgtgatagtttataccattcaatataatcgcttcatcctttagatggtgatcctgaattcgtttaaaaaaattatacggagatgccgtaataatttccttattcacttgtataatttccccattgatagaaaatatcacgctttccattcttgaagtactataagtaattatagtataatgtaaaggtttatatattcaatattttttataaaaaaatcattttgacattaattcctttttaaatttccgtctatcatctatagaaacgtattctatgaatttataaaatgcttttacgtgtcctatcgtaggcgatagaaccgctaaaaagcctatcgaatttctacaaaagaatctgttatatggtatagggagagtataaaacattaaatgtccgtacttattaaagtattcagtagccaatcctaactctttcgaatacttattaatggctcttgttctgtacgaatctatttttttgaacaacggacctagtggtatatcttgttctatgtatctaaaataatgtctgactagatccgttagtttaatatcctcagtcatcttgtctagaatggcaaatctaactgcgggtttaggctttagtttagtttttatatctacatctatgtctttatctaacaccaaaaatataatagctaatattttattacaatcatccggatattcttctacgatctcactaactaatgtttctttggttatactagtatagtcactatcggacaaataaagaaaatcagatgatcgatgaataatacatttaaattcatcatctgtaagatttttgagatgtctcattaaaatattattagggtcagtactcattatcattcggcagctattacttattttatttttctgtattttattatttttcaccatatagatcaatcattagatcatcaaaatatgtttcaatcatcctaaagagtatggtgaatgactcttcccatctaatttctgaacgttcaccaatgtctctagccactttggcactaatagcgatcattcgcttagcgtcttctatattattaactggttgattcaatctatctagcaatggaccgtcggacagcgtcattctcatgttcttaatcaatgtacatacatcgccgtcatctaccaattcatccaacaacataagctttttaaaatcatcattataataggtttgatcgttgtcatttctccaaagaatatatctaataagtagagtcctcatgcttagtaatttaactattttagttaacaactattttttatgttaaatcaattagtacaccgctatgtttaatacttattcatattttagtttttaggattgagaatcaatacaaaaaattaatgcatcattaattttagaaatacttagtttccacgtagttaatgaaacatttgaactcatcgtacaggacgttctcgtacaggacgtaactataaaccggtttatatttgttcaagatagatacaaatccgataactttttttacgaattctacgggatccactttaaaagtgtcataccgggttctttttattcttttaaacagatcaatggtgtgatgttgattaggtcttttacgaatttgatatagaatagcgttcacatatcctccataatggtcaatcgccatttgttcgtatgtcataaattctttaattatatgacactgtgtattatttagttcatccttgttcatcattaggaatctatccaaaatggcaattatactagaactataggtgcgttgtatacacatattgatgtgtctgtttatacaatccatgatatttggatccatgctactaccttcgggtaaaattgtagcatcatataccatttctagtactttaggttcattattatccattgcagaggacgtcatgatcgaatcctaaaaaaatatattatttttatgttattttgttaaaaataatcatcgaatacttcgtaagatactccttcatgaacataatcagttacaaaacgtttatatgaagtaaagtatctacgatttttacaaaagtccggatgcataagtacaaagtacgcgataaacggaataataatagatttatctagtctatctttttctatagctttcatagttagatacatggtctcagaagtaggattatgtaacatcagcttcgataaaatgactgggttatttagtcttacacattcgctcatacatgtatgaccgttaactacaaagtctacactaaaatgattgaacaatagatagtctaccattgtttcgtattcagatagtacagcgtagtacatagcatcttcacaaattatatcattgtctaatagatatttgacgcatcttatggatcccacttcaacagccatcttaaaatcggtagaatcatattgctttcctttatcattaataatttctaaaacatcatctctatcataaaagatacaaatattaactgtttgatccgtaataacattgctagtcgatagcaatttgttaataagatgcgctgggctcaatgtcttaataagaagtgtaagaggactatctccgaatttgttttgtttattaacatccgttgatggaagtaaaagatctataatgtctacattcttgactgttttagagcatacaatatggagaggtgtatttccatcatgatctggttttgagggactaattcctagtttcatcatccatgagattgtagaagcttttggattgtctgacataagatgtctatgaatatgatttttgccaaatttatccactatcctggcttcgaatccgatggacattatttttttaaacactctttctgaaggatctgtacacgccaacaacggaccacatccttcttcatcaaccgagttgttaatcttggctccatactgtaccaataaatttattctctctatgacttcatcatctgttcccgagagataatatagaggtgttttattatgtttatcacacgcgtttggatctgcgccgtgcgtcagcagcatcgcgactattctattattattaattttagaagctatatgcaatggataatttccatcatcatccgtctcatttggagagtatcctctatgaagaagttcttcgacaaatcgttcatctagtcctttaattccacaatacgcatgtagaatgtgataattatttccagaaggttcgatagcttgtagcatattcctaaatacatctaaatttttactattatatttggcataaagagatagataatactcggccgacataatgttgtccattgtagtataaaaattaatatttctatttctatttctgtatatttgcaacaatttactctctataacaaatatcataacttagttcttttatgtcaagaaggcactggtttagttcatctataaatgtcacgccataactaccacgcatgctatactcagaattatgataaagatatttatccttggggtgtaggtaatggggattaatctttgttggatcagtctctaagttaacacatgtcacacatgatccatttatagttatatcacacgatgatgatttatgaattgattccggaagatcgctatcgtattttgtggttccacaattcatttccatacatgttattgtcacactaatattatgatgaactttatctagccgctgagtggtaaacaacagaacagatagtttattatctttaccaacaccctcagccgctgccacaaatctctgatccgtatccatgatggtcatgtttatttctagtccgtatccagtcaacactatgttagcatttctgtcgatatagctttcactcatatgacactcaccaataatagtagaattaatgtcgtaatttacaccaatagtgagttcggcggcaaagtaccaataccggtaatcttgtcgaggaggacatatagtattcttgtattctaccgaatacccgagagatgcgatacaaaagagtaagactaatttgtaaaccatcttactcaaaatatgtaacaatagtacgatgcaatgagtaagacaataggaaatctatcttatatacacataattattctatcaattttaccaattagttagtgtaatgttaacaaaaatgtgggagaatctaattagtttttctttacacaattgacgtacatgagtctgagttccttgtttttgctaattatttcatccaatttattattcttgactatatcgagatcttttgtataggagtcagacttgtattcaacatgcttttctataatcattttagctatttcggcatcatccaatagtacattttccagattagcagaatagatattaatgtcgtatttgaacagagcctgtaacatctcaatgtctttattatctatagccaatttaatgtccggaatgaagagaagggaattattggtgtttgtcgacgtcatatagtcgagcaagagaatcatcatatccacgtgtccattttttatagtgatgtgaatacaactaaggagaatagccagatcaaaagtagatggtatctctgaaagaaagtaggaaacaatacttacatcattaagcatgacggcatgataaaatgaagttttccatccagttttcccatagaacatcagtctccaatttttcttaacaaacagttttaccgtttgcatgttaccactatcaaccgcataatacaatgcggtgtttcccttgtcatcaaattgtgaatcatccagtccactgaatagcaaaatctttactattttggtatcttccaatgtggctgcctgatgtaatggaaattcattctctagaagatttttcaatgctccagcgttcaacaacgtacatactagacgcacgttattatcagctattgcataatacaaggcactatgtccatggacatccgccttaaatgcatctttgctagagagaaagcttttcagctgcttagacttccaagtattaattcgtgacagatccatgtctgaaacgagacgctaattagtgtatattttttcattttttataattttgtcatattgcaccagaattaataatatctctaatagatctgattagtagatacatggctatcgcaaaacaacatatacacatttaataaaaataatatttattaagaaaattcagatttcacgtacccatcaatataaataaaataatgattccttacaccgtacccatattaaggagattccaccttacccataaacaatataaatccagtaatatcatgtctgatgatgaacacaaatggtgtattaaattccagtttttcaggagatgatctcgccgtagctaccataatagtagatgcctctgctacagttccttgttcgtcgacatctatctttgcattctgaaacattttataaatatataatgggtccctagtcatatgtttaaacgacgcattatctggattaaacatactaggagccatcatttcggctatcgacttaatatccctcttattttcgatagaaaatttagggagtttaagattgtacactttattccctaattgaaacgaccaatagtctaattttgcagccgtaatagaatctgtgaaatgggtcatattatcacctattgccaggtacatactaatattagcatccttatacggaaggcgtaccatatcatattcttcgtcatcgattgtgattgtatttccttgcaatttagtaactacgttcatcatgggaaccgttttcgtaccgtacttattagtaaaactagcattgcgtgttttagtgatatcaaacggatattgccatatacctttaaaatatatagtattaatgattgcccatagagtattattgtcgagcatattagaatctactacattagacataccggatctacgttctactatagaattaattttattaaccgcatctcgtctaaagtttaatctatataggccgaatctatgatattgttgataatacgacggtttaatgcacacagtattatctacgaaactttgataagttagatcagtgtacgtatatttagatgttttcagcttagctaatcctgatattaattctgtaaatgctggacccagatctctttttctcaaatccatagtcttcaataattctattctagtattacctgatgcaggcaatagcgacataaacatagaaaacgaataaccaaacggtgagaagacaatattatcatcttgaatatttttatacgctactataccggcattggtaaatccttgcagacgataggtagacactgaacacgttaacgatagtatcaataacgcaatcatgattttatggtattaataattaaccttatttttatgttcggtataaaaattattgatgtctacacatccttttgtaattgacatctatatatccttttgtataatcaactctaatcactttaacttttacagttttccctaccagtttatccctatattcaacatatctatccatatgcatcttaacactctctgccaagatagcttcaaagtgaggatagtcaaaaagataaatatatagagcataatccttctcgtatactctgccctttattacatcacccgcattgggcaacgaataacaaaatgcaagcatcttgttaacgggctcgtaaattgggataaaaattatgtttttatatctattttattcaagagaatattcaggaatttctttttccggttgtatctcatcgcagtatatatcatttgtacattgtttcatattttttaatagtctacaccttttagtaggactagtatcgtacaattcatagctgtattttgaattccaatcacgcataaaaatatcttccaattgttgacgaagacctaatccatcatccggtgtaatattaatagatgctccacatgtatccgtaaagtaatttcctgtccaatttgaggtacctatatacgccgttttatcggttaccatatatttggcatggtttaccctagaatacggaatgggaggatcagcatctggtacaataaatagctttacttctatatttatgtttttagattttagcatagcgatagatcttaaaaagtttctcatgataaacgaagatcgttgccagcaactaatcaatagcttaactgacacttgtctgtctatagcggctcttcttaattcatcttctatataaggccaaaacaaaatattgcctgccttcgaataaataatagggataaagttcataacagatacataaacgaatttactcgcatttctgatacatgacaataaagcggttaaatcattggttctttccatagtacatagttgttgcggtgcagaagcaataaatacagagtgtggaacgccgcttacgttaatactaagaggatgatctgtattataatacgacggataaaagtttttccaattatatggtagattgttaactccaagataccagtatacctcaaaaatttgagtgagatccgctgccaagttcctattattgaagatcgcaatacccaattctttgacctgagttagtgatctccaatccatgttagcgcttcctaaataaatatgtgtattatcagatatccaaaattttgtatgaagaactcctcctaggatatttgtaatatctatgtatcgtacttcaactccggccatttgtagtctttcaacatcctttaatggtttgttagatttattgacggctactctaactcgtactcctcttttgggtaattgtacaatcttgtttaatattatcgtgccgaaattcgtacccacttcatccgataaactccaataaaaagatgatatatctagtgtttttgtggtattggatagaatttccctccacatgttaaatgtagacaaatatactttatcaaattgcatacctataggaatagtctctgtaatcactgcgattgtattatccggattcattttatttgttaaaagaataatcctatatcacttcactctattaaaaatccaagtttctatttctttcatgactgattttttaacttcatccgtttccttatgaagatgatgtttggcaccttcataaatttttatttctctattacaatttgcatgttgcatgaaataatatgcacctaaaacatcgctaatcttattgtttgttccctggagtatgagagtcggggggtgttaatcttggaaattatttttctaaccttgttggtagccttcaagacctgactagcaaatccagccttaattttttcatgattgattaatgggtcgtattggtatttataaactttatccatatctctagatactgattctggacatagctttccgactggcgcatttagtgtgatggttcccataagtttggcagctagcagattcagttttgaaacagcatctgcattaactagaggagacattagaatcattgctgtaaacaagtttggattatcgtaagaggctagctcccatggaatgacccaataagtagatttaatagttaccacgtgctgtaccaaagtcatcaatcatcattttttcaccattacttcttccatgtccaatatgatcatgtgagaatactaaaattcctaacgatgatatgttttcagctagttcgtcataacgtccagaatgtttaccagctccatgacttatgaatactaatgccttaggatatgtaataggtttccaatatatgtaatcattgtccagattgaacatacagtttgcactcatgattcacgttatataactatcaatattaacagttcgtttgatgatcatattatttttatgttttattgataattgtaaaaacatacaattaaatcaatatagaggaaggagacggctactgtcttttgtgagatagtcatggcgactaaattagattatgaggatgctgttttttactttgtggatgatgataaaatatgtagtcgcgactccatcatcgatctaatagatgaatatattacgtggagaaatcatgttatagtgtttaacaaagatattaccagttgtggaagactgtacaaggaattgatgaagttcgatgatgtcgctatacggtactatggtattgataaaattaatgagattgtcgaagctatgagcgaaggagaccactacatcaattttacaaaagtccatgatcaggaaagtttattcgctaccataggaatatgtgctaaaatcactgaacattggggatacaaaaagatttcagaatctagattccaatcattgggaaacattacagatctgatgaccgacgataatataaacatcttgatactttttctagaaaaaaaattgaattgatgatataggggtcttcataacgcataattattacgttagcattctatatccgtgttaaaaaaaattatcctatcatgtatttgagagttttatatgtagcaaacatgatagctgtgatgccaataagctttagatattcacgcgtgctagtgttagggatggtattatctggtggtgaaatgtccgttatataatctacaaaataatcatcgcatatagtatgcgatagtagagtaaacatttttatcgtttctactgggttcatacatcgtctacccaattcggttataaatgaaattgtcgccaatcttacacccaaccccttgttatccattagtatagtattaacttcgttatttatgtcataaactgtaaatgattttgtagatgccatatcatacatgatattcatgtccctattataatcattactaactttatcacaatatatgttgataatatctatatatgatctagtctttgtgggcaactgtctatacaagtcgtctaaacgttgtttactcatatagtatcgaacagccatcattacatggtcccgttccgttgatagataatcgagtatgttagtggacttgtcaaatctatataccatattttctggaagtggatatacatagtcgtgatcaacattattgctagcctcatcttctatatcctgtactataccattatctatatcatctacataatctacgatattattacacataaacatcgacaacatactattgtttattatctaagtcctgttgatccaaacccttgatctcctctatttgtactatctagagattgtacttcttccagttctggataatatatacgttgatagattagctgagctattctatctccagtatttacattaaacgtacattttccattattaataagaatgactcctatgtttcccctataatcttcgtctattacaccgcctcctatatcaatgccttttagggacagaccagacctaggagctattctaccatagcagaacttaggcatggacatactaatatctgtcttaattaactgtcgttctcctggagggatagtataatcgtaagcgctatataaatcatatccggcggcgtaaggtgattgcctagtaggagatttagctctgttagtttccttaacaaatctaactggtgagttaatattcatgttgaacataaaactaatattttatttcaaaattatttaccatcccatatattccatgaataagtgtgatgattgtacacttctatagtatctatatacgattcacgataaaatcctcctatcaatagcagtttattatccactatgatcaattctggattatccctcggataaataggatcatctatcagagtccatgtattgctggattcacaataaaattccgcatttctaccaaccaagaataaccttctaccgaacactaacgcgcatgatttataatgaggataataagtggatggtccaaactgccactgatcatgattgggtagcaaatattctgtagttgtatcagtttcagaatgtcctcccattacgtatataacattgtttatggatgccactgctggattacatctaggtttcagaagactcggcatattaacccaagcagcatccccgtggaaccaacgctcaacagatgtgggatttggtagacctcctactacgtataatttattgttagcgggtatcccgctagcatacagtctggggctattcatcggaggaattggaatccaattgtttgatatataatttaccgctatagcattgttatgtatttcattgttcatccatccaccgatgagatatactacttctccaacatgagtacttgtacacatatggaatatatctataatttgatccatgttcataggatactctatgaatggatacttgtatgatttgcgtggttgtttatcacaatgaaatattttggtacagtctagtatccattttacattatttatacctctgggagaaagataatttgacctgattacatttttgataaggagtagcagatttcctaatttatttcttcgctttatataccacttaatgacaaaatcaactacataatcctcatctggaacatttagttcatcgctttctagaataagtttcatagatagataatcaaaattgtctatgatgtcatcttccagttccaaaaagtgtttggcaataaagtttttagtatgacataagagattggatagtccgtattctatacccatcatgtaacactcgacacaatattcctttctaaaatctcgtaagataaagtttatacaagtgtagatgataaattctacagaggttaatatagaagcacgtaataaattgacgacgttatgactatctatatatacctttccagtatacgagtaaataactatagaagttaaactgtgaatgtcaaggtctagacaaacccttgtaactggatctttatttttcgtgtatttttgacgtaaatgtgtgcgaaagtaaggagataactttttcaatatcgtagaattgactattatattgccacctatagcatcaataattgttttgaatttcttagtcatagacaatgctaatatattcttacagtacacagtattaacaaatatcggcatttatgtttctttaaaagtcaacatctaaagaaaaatgattatcttcttgagacataactcccattttttggtattcacccacacgtttttcgaaaaaattagtttttccttccaatgatatattttccatgaaatcaaacggattggtaacattataaatttttttaaatcccaattcagaaatcaatctatccgcgacgaattctatatatgttttcatcatttcacaattcattcctataagtttaactggaagagccgcagtaagaaattcttgttcaatggataccgcatctgttataatagatctaacggtttcttcactcggtggatgcaataaatgtttaaacatcaaacatgcgaaatcgcagtgcagaccctcgtctctactaattagttcgttggaaaacgtgagtccgggcattaggccacgctttttaagccaaaatatggaagcgaatgatccagaaaagaagattccttctactgcagcaaaggcaataagtctctctccataaccggcgctgtcatgtatccacttttgagcccaatcggccttcttttttacacaaggcatcgtttctatggcattaaagagatagtttttttcattactatctttaacataagtatcgatcaaaagactatacatttccgaatgaatgttttcaatggccatctgaaatccgtagaaacatctagcctcggtaatctgtacttctgtacaaaatcgttccgccaaattttcattcactattccgtcactggctgcaaaaaacgccaatacatgttttataaaatatttttcgtctggtgttagtttattccaatcattgatatctttagatatatctacttcttccactgtccaaaatgatgcctctgcctttttatacatgttccagatgtcataatattggattgggaaaataacaaatctatttggatttggtgcaaggatgggttccataactaaattaacaataacaataaattttttttcagttatctatatgcctgtacttggatcttttgtacatcgatatcgccgcaatcactacaataattacaagtattattgatagcattgttattagtactatcataattaaattatcgacattcatgggtgctgaataatcgttattatcatcattatcattttgtaattgtgacatcatactagataaatcgtttgcgagattgttgtgggaagcgggcatggaggatgaattatcgttattattatttaacgcctcccattcggattcacaaatgttacgcacattcaacattttatggaaactataattttgtgaaaacagataacaagaaaactcgtcatcgttcaaatttttaacgatagtaaaccgattaaacgtcgagctaatttctaacgctagcgactctgttggatatgggtttccagatatatatcttttcagttcccctacgtatctataatcatctgtaggaaatggaagatatttccatttatctactgttcctaatatcatatgtggtggtgtagtagaaccattaagcgcgaaagatgttatttcgcatcgtattttaacttcgcaataatttctggttagataacgcactctaccagtcaagtcaatgatattagcctttacagatatattcatagtagttgtaacgatgactccatcttttagatgcgatactcctttgtatgtaccagaatcttcgtaccgcaaactcgatatatttaaacaagttaatgagatattaacgcgttttatgaatgatgatatataaccagaagttttatcctcggtggctagcgctataaccttatcattataataccaactagtgtgattaatatgtgacacgttagtgtgggtacaaatatgtacattatcgtctacgtcgtattcgatacatccgcatacagccaacaaatataaaatgacaaatactctaacgccgttcgtacccatcttgatgcggtttaataaatgttttgatttcaatttattgtaaaaaaagattcggttttatactgttcgatattctcattgcttatattttcatctatcatctccacacagtcaaatccgtggttagcatgcacctcatcaaccggtaaaagactatcggactcttctatcattataactctagaatatttaatttggtcattattaatcaagtcaattatcttatttttaacaaacgtgagtattttactcattttttataaaaacttttagaaatatacagactctatcgtgtgtctatatcttctttttatatccaatgtatttatgtctgatttttcttcatttatcatatataatggtccaaattctacacgtgcttcggattcatccagatcattaaggttcttataattgtaacatccttctcttccctcttctacatcttccttcttattcttattcttagcgtcacagaatctaccacagcaggatcccatgacgagcgtcatattaaactaatccattttcaattataatatacgattagtaatgaccattaaaataaaaaatattcttcataaccggcaagaaagtgaaaagttcacattgaaactatgtcagtagtatacatcatgaaatgatgatatatatatactctattttggtggaggattatatgatataattcgtggataatcattcttaagacacatttcttcattcgtaaatcttttcacgttaaatgagtgtccatattttgcaatttcttcatatgatggcggtgtacgtggacgaagctgctcctgttcttgttgtagtcgccgactgtcgtgtttgcgtttagatccctccattatcgcgattgcgtagatggagtactattatataccttgtaattaaatttttttattaattaaacgtataaaaacgttccgtatctgtatttaagagccagatttcgtctaatagaacaaatagctacagtaaaaataactagaataattgctacacccactagaaaccacggatcgtaatacggcaatcggttttcgataataggtggaacgtatattttatttaaggacttaacaattgtctgtaaaccacaatttgcttccgcggatcctgtattaactatctgtaaaagcatatgttgaccgggcggagccgaacattctccgatatctaatttctgtatatctataatattattaacctccgcatacgcattacagttcttttctagcttggataccgcactaggtacatcgtctagatctattcctatttcttcagcgatagctcttctatccttttccggaagcaatgaaatcacttcaataaatgattcaaccatgagtgtgaaactaagtcgagaattactcatgcatttgttagttattcggagcgcgcaatttttaaactgtcctataacctctcctatatgaatagcacaagtgacattagtagggatagaatgttgagctaatttttgtaaataactatctataaaaagattatacaaagttttaaactctttagtttccgccatttatccagtctgagaaaatgtctctcataataaatttttccaagaaactaattgggtgaagaatggaaacctttaatctatatttatcacagtctgttttggtacacatgatgaattcttctaatgctgtactaaattcgatatctttttcgatttctggatatgtttttaataaagtatgaacaaagaaatggaaatcgtaataccagttatgttcaactttgaaattgttttttattttcttgttaatgattccagccacttgggaaaagtcaaagtcgtttaatgccgatttaatacgttcattaaaaacaaactttttatcctttagatgaattattattggttcattggaatcaaaaagtaagatattatcgggtttaagatctgcgtgtaaaaagttgtcgcaacagggtagttcgtagattttaatgtataacagagccatctgtaaaaagataaactttatgtattgtaccaaagatttaaatcctaatttgatagctaactcggtatctactttatctgccgaatacagtgctaggggaaaaattataatatttcctctttcgtattcgtagttagttctcttttcatgttcgaaaaagtgaaacatgcggttaaaatagtttataacattaatattactgttaataactgccggataaaagtgggatagtaatttcacgaatttgatactgtcctttctctcgttaaacgcctttaaaaaaactttagaagaatatctcaatgagagttcctgaccatccatagtttgtatcaataatagcaacatatgaagaacccgtttatacagagtatgtaaaaatgttaatttatagtttaatcccatggcccacgcacacacgattaattttttttcatctccctttagattgttgtatagaaatttgggtactgtgaactccgccgtagtttccatgggactatataattttgtggcctcgaatacaaattttactacatagttatctatcttaaagactataccatatcctcctgtagatatgtgataaaaatcgtcgtttataggataaaatcgtttatccttttgttggaaaaaggatgaattaatgtaatcattctcttctatctttagtagtgtttccttattaaaattcttaaaataatttaacaatctaactgacggagcccaattttggtgtaaatctaattgggacattatgttgttaaaatacaaacagtctcctaatataacagtatctgataatctatggggagacatccattgatattcaggggatgaatcattggcaacacccatttattgtacaaaaagccccaatttacaaacgaaagtccaggtttgatagagacaaacaattaactattttgtctctgtttttaatttctttggtaatgaaattattcacaatatcagtatcttctttatctaccagagattttactaacttgataaccttggctgtctcattcaatagggtagtaatatttgtatgtgtgatattgatatctttttgaattgtttcttttagaagtgattctttgatggtgccagcatacgaattacaataatgcagaaactcagttaacatgcaggaattatagtaagccaattccaattgttgcctgtattgtattagagtattaatatgcgcaatggtgtccttgcgtttctctgatagaatgcgagcagcgattttggcgttatcatttgacgatatttctggaatgacgaatcctgtttctactaactttttggtaggacaaagtgaaacaatcaagaagatagcttctcctcctatttgtggaagaaattgaactcctctagatgatctactgacgatagtatctccttgacagatattggaccgaattacagaagtacctggaatgtaaagccctgaaaccccctcattttttaagcagattgttgccgtaaatcctgcactgtgaccaagatagagagctcctttggtgaatccatctctatgtttcagtttaaccaagaaacagtcagctggtctaaaatttccatctctatctaatacagcatctaacttgatgtcaggaactatgaccggtttaatgttatatgtaacattgagtaaatccttaagttcataatcatcactgtcatcagttatgtacgatccaaacaatgtttctactggcatagtggatacgaagatgctatccatcagaatgtttccctgattagtattttctatatagctattcttctttaaacgattttccaaatcagtaactatgttcatttttttaggagtaggacgcctagccagtatggaagaggattttctagatcctctcttcaacatctttgatctcgatggaatgcaaaaccccatagtgaaacaaccaacgataaaaataatattgtttttcactttttataattttaccatctgactcatggattcattaatatctttataagagctactaacgtataattctttataactgaactgagatatatacaccggatctatggtttccataattgagtaaatgaatgctcggcaataactaatggcaaatgtatagaacaacgaaattatactagagttgttaaagttaatattttctatgagctgttccaataaattatttgttgtaactgcgttcaagtcataaatcatcttgatactatccagtaaaccgtgtttaagttctggaatattatcatcccattgtaaagcccctaattcgactatcgaatatcctgctctgatagcagtttcaatatcgacggacgtcaatactgtaataaaggtggtagtattgtcatcatcgtgataaactacgggaatatggtcgttagtaggtacggtgactttacacaacgcgatatataactttccttttgtaccatttttaacgtagttgggacgtcctgcagggtattgttttgaagaaatgatatcgagaacagatttgatacgatatttgttggattcctgattattcactataatataatctagacagatagatgattcgataaatagagaaggtatatcgttggtaggataatacatccccattccagtattctcggatactctattgatgacactagttaagaacatgtcttctattctagaaaacgaaaacatcctacatggactcattaaaacttctaacgctcctgattgtgtctcgaatgcctcgtacaaggatttcaaggatgccatagattctttgaccaacgatttagaattgcgtttagcatctgatttttttattaaatcgaatggtcggctctctggtttgctaccccaatgataacaatagtcttgtaaagataaaccgcaagaaaatttatacgcatccatccaaataaccctagcaccatcggatgatattaatgtattattatagattttccatccacaattattgggccagtatactgttagcaacggtatatcgaatagattactcatgtaacctactagaatgatagttcgtgtactagtcataatatctttaatccaatctaagaaatttaaaattagattttttacactgttaaagttaacaaaggtattacccggatacgtggatatcatatatggcattggtccattatcagtaatagctccataaactgatacggcgatggtttttatatgtgtttgatctaacgaggaagaaattcgcgcccacaattcatctctagatatgtatttaatatcaaacggtaacacatcaatttcgggacgcgtatatgtttctaaatttttaatccaaatataatgatgacctatatgccctattatcatactgtcaactatagtacacctagagaacttacgatacatctgtttcctataatcgttaaattttacaaatctataacatgctaaaccttttgacgacagccattcattaatttctgatatggaatctgtattctcgataccgtattgttctaaagccagtgctatatctccctgttcgtgggaacgctttcgtataatatcgatcaacggataatctgaagtttttggagaataatatgactcatgatctatttcgtccataaacaatctagacataggaattggaggcgatgatcttaattttgtgcaatgagtcgtcaatcctataacttctaatcttgtaatattcatcatcgacataatactatctatgttatcatcgtatattagtataccacggccttcttcatttcgtgccaaaataatatacagtcttaaataattacgcaatatctcaatagtttcataattgttagctgttttcatcaagatttgtaccctgtttaacatgatggcgttctatacgtctctattttcttttttttaaatttttaacgatttactgtggctagatacccaatctctctcaaatatttttttagcctcgcttacaagctgtttatctatactattaaaactgacgaatccgtgattttggtaatgggttccgtcgaaatttgccgaagtgatatgaacatattcgtcgtcgactatcaacaattttgtattattctgaatagtgaaaaccttcacagatagatcattttgaacacacaacgcgtctagacttctggcggttgccatagaatatacgtcgttcttatcccaattaccaactagaagtctgatcttaactcctctattaatggctgcttctataatggagttgtaaatgtcgggccaatagtagctattaccgtcgacacgtgtagtgggaactatggccaaatgttcaatatctatactagtcttagccgacttgagtttatcaataactacatcggtatctagatctctagaatatcccaataggtgttccggagaatcagtaaagaacactccacctataggattcttaatatgatacgcagtgctaactggcaaacaacaagccgcagagcataaattcaaccatgaattttttgcgctattaaaggctttaaaagtatcaaatcttctacgaagatctgtggccagcgggggataatcagaatatacacctaacgttttaatcgtatgtatagatcctccagtaaatgacgcgtttcctacataacatctttcatcatctgacacccaaaaacaaccgagtagtagtcccacattattttttttatctatattaacggttataaaatttatatccgggcagtgactttgtagctctcccagatttcttttccctcgttcatctagcaaaactattattttaatccctttttcagatgcctcttttagtttatcaaaaataagcgctcccctagtcgtactcagaggattacaacaaaaagatgctatgtatatatatttcttagctagagtgataatttcgttaaaacattcaaatgttgttaaatgatcggatctaaaatccatattttctggtagtgtttctaccagcctacattttgctcccgcaggtaccgatgcaaatggccacatttagttaacataaaaacttatacatcctgttctatcaacgattctagaatatcatcggctatatcgctaaaattttcatcaaagtcgacatcacaacctaactcagtcaatatattaagaagttccatgatgtcatcttcgtctatttctatatccgtatccattgtagattgttgaccgattatcgagtttaaatcattactaatactcaatccttcagaatacaatctgtgtttcattgtaaatttataggcggtgtatttaagttggtagattttcaattatgtatcaatatagcaacagtagttcttgctcctccttgattctagcatcctcttcattattttcttctacgtacataagcatgtccaatacgttagacaacacaccgacgatggcggccgccacagacacgaatatgactagaccgatgaccatttaaaaacccctctctagctttcacttaaactgtatcgattattcttttagaacatgtataatataaaaacattattctatttcgaatttaggcttccaaaaatttttcatccgtaaaccgataataatatatatagacttgttaatagtcggaataaatagattaatgcttaaactatcatcatctccacgattagagatacaatatttacattttttttgctgtttcgaaactttatcaatacacgttaatacaaacccaggaaggagatattgaaactgaggctgttgaaaatgaaacggtgaatacaataattcagataatgtaaaatcatgattccgtattctgatgatattagaactgctaatggatgtcgatggtatgtatctaggagtatctattttaacaaagcatcgatttgctaatatacaattatccttttgattaattgttattttattcatattcttaaaaggtttcatatttatcaattcttctacattaaaaatttccatttttaatttatgtagcccccgcaatactcctcattacgtttcattttttgtctataatatccattttgttcatctcggtacatagattatccaattgagaagcgcatttagtagttttgtacattttaagtttattgacgaatcgtcgaaaactagttatagttaacattttattatttgataccctgatattaatacccctgccgttactattatttataactgatgtaatccacgtaacattagaattaattatcgatagtaatgcatcgacgcttccaaaattgtctattataaactcaccgataatttttttattgcatgttttcatattcattaggattatcaaatctttaatcttactacgattgtatgcgttgatattgcaagacgtcattctaaaagacggaggatctccatcaaatgccagacaatcacgtacaaagtacatggaaataggttttgttctattgcgcatcatagatttatatagaacacccgtagaaatactaatttgttttactctataaaatactaatgcatctatttcatcgttttgtataacgtctttccaagtgtcaaattccaaatttttttcattgatagtaccaaattcttctatctctttaactacttgcatagataggtaattacagtgatgcctacatgccgttttttgaaactgaatagatgcgtctagaagcgatgctacgctagtcacaatcaccactttcatatttagaatatatgtatgtaaaaatatagtagaatttcattttgtttttttctatgctataaatgaattctcattttgcatctgctcatactccgttttatatcaataccaaagaaggaagatatctggttctaaaagccgttaaagtatgcgatgttagaactgtagaatgcgaaggaagtaaagcttcctgcgtactcaaagtagataaaccctcatcgcccgcgtgtgagagaagaccttcgtccccgtccagatgcgagagaatgaataaccctggaaaacaagttccgtttatgaggacggacatgctacaaaatatgttcgcggctaatcgcgacaacgtggcgtcgagacttttgaactaaaatacaattatatccttttcgatattaataaatccgtgtcgtccaggttttttatctctttcagtatgtgaatagataggtattttatctctattcatcatcgaatttaagagatccgataaacattgtttgtattctccagatgtcagcatctgatacaacaatatatgtgcacataaacctctggcacttatttcatgtaccttccccttatcactaaggagaatagtatttgagaaatatgtatacatgatattatcatgaattagatatacagaatttgtaacactctcgaaatcacacgatgtgtcggcgttaagatctaatatatcactcgataacacattttcatctagatacactagacattttttaaagctaaaatagtctttagtagtgacagtaactatgcgattattttcatcgatgatacatttcatcggcatattattacgcttaccatcaaagactataccatgtgtatatctaacgtattctagcatggttgccatacgcgcattaaacttttcaggatctttggatagatcttccaatctatctatttgagaaaacatttttatcatgttcaatagttgaaacgtcggatccactatatagatattatctataaagattttaggaactacgttcatggtatcctggcgaatattaaaactatcaatgatatgattatcgttttcatcttttatcaccatatagtttctaagatatgggattttacttaatataatattatttcccgtgataaattttattagaaaggccaaatctataagaaaagttctagaattagtctgaagaatatctatatcgccgtaccgtatatttggattaattagatatagagaatatgatccgtaacatatacaacttttattatggcgtctaagatattcttccatcaacttattaacatttttgactagggaagatacattatgacgtcccattacttttgccttgtctattactgcgacgttcatagaatttagcatatctcttgccaattcttccattgatgttacattataagaaattttagatgaaattacatttggagctttaatagtaagaactcctaatatgtccgtgtatgtggtcactaatacagattgtagttctataatcgtaaataatttacctatattatatgtttgagtctgtttagaaaagtagctaagtatacgatcttttatttctgatgcagatgtattaacatcggaaaaaaatctttttttattcttttttactaaagatacaaatatgtctttgttaaaaacagttattttttgaatatttctagcttgtaattttaacatatgatattcgttcacactaggtactctgcctaaataggtttctataatctttaatgtaatattaggaagagtattctgatcaggattcctattcattttgaggatttaaaactctgattattgtctaatatggtctctacgcaaactttttcacagagcgatagagtttttgataactcgtttttcttaagaaatataaaactactgtctccagagctcgctctatcttttattttatttaattcgatacaaactcctgatactggttcagaaagtaattcattaattttcagtcctttatagaagatatttaatatagataatacaaaattttcagttcttgatatcgatctgattgatcctagaactagatatattaataacgtgctcattaggcagtttatggcagcttgataattagatatagtatattccagttcatatttattagataccgcattgcccagattttgatattctatgaattcctctgaaaataaatccaaaataactaaacattctattttttgtggattagtgtactctcttccctctatcatgttcactactggtgtccacgatgataaatatctagagggaatataatatagtccataggatgccaatctagcaatgtcgaataactgtaatttgattcttcgttcttcattatgaattgattcttgaggtataaacctaacacaaattatattattagacttttcgtatgtaatgtctttcatgttataagtttttaatcctggaatagaatctattttaatgaggcttttaaacgcagagttctccaacgagtcaaagcataatactctgttgtttttcttatatacgatgttacgattttcttctttgaatggaataggtttttgaattagtttataattacaacataatagataaggaagtgtgcaaatagtacgcggaaaaaacataatagctcccctgttttcatccatggttttaagtaaatgatcactggcttctttagtcaatggatattcgaacattaaccgtttcatcatcattggacagaatccatatttcttaatgtaaagagtgatcaaatcattgtgtttattgtaccatcttgttgtaaatgtgtattcggttatcggatctgctcctttttctattaaagtatcgatgtcgatctcgtctaagaattcaactatatcgacatatttcatttgtatacacataaccattactaacgtagaatgtataggaagagatgtaacgggaacagggtttgttgattcgcaaactattctaatacataattcttctgttaatacgtcttgcacgtaatctattatagatgccaagatatctatataattattttgtaagatgatgttaactatgtgatctatataagtagtgtaataattcatgtatttcgatatatgttccaactctgtctttgtgatgtctagtttcgtaatatctatagcatcctcaaaaaatatattcgcatatattcccaagtcttcagttctatcttctaaaaaatcttcaacgtatggaatataataatctattttacctcttctgatatcattaatgatatagtttttgacactatcttctgtcaattgattcttattcactatatctaagaaacggatagcgtccctaggacgaactactgccattaatatctctattatagcttctggacataattcatctattataccagaattaatgggaactattccgtatctatctaacatagttttaagaaagtcagaatctaagacctgatgttcatatattggttcatacatgaaatgatctctattgatgatagtgactatttcattctctgaaaattggtaactcattctatatatgctttccttgttgatgaaggatagaatatactcaatagaatttgtaccaacaaactgttctcttatgaatcgtatatcatcatctgaaataatcatgtaaggcatacatttaacaattagagacttgtctcctgttatcaatatactattcttgtgataatttatgtgtgaggcaaatttgtccacgttctttaattttgttatagtagatatcaaatccaatggagctacagttcttggcttaaacagatatagtttttctggaacgaattctacaacattattataaaggactttgggtagataagtgggatgaaatcctattttaattaatgcgatagccttgtcctcgtgcagatatccaaacgcttttgtgatagtatggcattcattgtctagaaacgctctacgaatatctgtgacagatatcatctttagagaatatactagtcgcgttaatagtactacaatttgtattttttaatctatctcaataaaaaaattaatatgtatgattcaatgtataactaaactactaactgttattgataactagaatcagaatctaatgatgacgtaaccaagaagtttatctactgccaatttagctgcattatttttagcatctcgtttagattttccatctgccttatcgaatactcttccgtcgatgtctacacaggcataaaatgtaggagagttactaggccccactgattcaatacgaaaagaccaatctctcctagtaatttggcagtactcattaataacggtgacagggttagcacctttccaatcaataatttttttagccggaataacatcatcaaaagacttatgatcctctctcattgatttttcgcgggatacatcatctattatgacgtcagccatagcatcagcatccggcttatccgcctccgttgtcataaaccaacgaggaggaatatcgtcggagctgtacaccatagcactacgttgaagatcgtacagagctttattaacttctcgcttctccatattaagttgtctagttagttgtgcagcagtagctccttcgattccaatggttttaatagcctcacacacaatctctgcgttagaacgctcgtcgatatagattttagacatttttagagagaactaacgcaatcagtaataaaactaatttattttatcattttttttattcatcatcctctggtggttcgtcgtttctatcgaatgtagctctgattaacccgtcatctataggtgatgctggttctggagattctggaggagatggattattatctggaagaatctctgttatttccttgttttcatgtatcgattgcgttgtaacattaagattgcgaaatgctctaaatttgggaggcttaaagtgttgtttgcaatctctacacgcgtgtctaactagtggaggttcgtcagcggctctagtttgaatcatcatcggcgtagtattcctacttttacagttaggacacggtgtattgtatttctcgtcgagaacgttaaaataatcgttgtaactcacatcctttattttatctatattgtattctactcctttcttaatgcattttataccgaataagagatagcgaaggaattctttttcggtgccgctagtacccttaatcatatcacatagtgttttatattccaaatttgtggcaatagacggtttatttctatacgatagtttgtttctggaatcctttgagtattctataccaatattattctttgattcgaatttagtttcttcgatattagattttgtattacctatattcttgatgtagtactttgatgatttttccatggcccattctattaagtcttccaagttggcatcatccacatattgtgatagtaattctcggatatcagtagcggttaccgccattgatgtttgttcattggatgagtaactactaatgtatacattttccatttataacacttatgtattaactttgttcatttatattttttcattattatgttgatattaacaaaagtgaatatatatatgttaataattgtattgtggttatacggctacaattttataattagtgaaagtcagtgtccgatgatcaatgacgatagctttactctgaaaagaaagtatcaaatcgatagtgcggagtcaacaataaaaatggataagaagaggacaaagtttcagaatagagccaaaatggtaaaagaaataaatcagacaataagagcagcacaaactcattacgagacattgaaactaggatacataaaatttaagagaatgattaggactactactctagaagatatagcaccatctattccaaataatcagaaaacttataaactattctcggacatttcagccatcggcaaagcatcacggaatccaagtaagatggtatatgctctgctgctttacatgtttcccaatttgtttggagatgatcatagattcattcgttatagaatgcatccaatgagtaaaatcaaacacaagatcttctctcctttcaaacttaatcttattagaatattagtggaagaaagattctataataatgaatgcagatctaataaatggagaataattggaacacaagttgataaaatgttgatagctgaatctgataaatatacaatagatgcaaggtataacctaaaacccatgtatagaatcaagggaaaatctgaagaagataccctctttatcaaacagatggtagaacaatgtgtgacatcccaggaattggtggaaaaagtgttgaagatactgtttagagatttgttcaagagtggagaatacaaagcgtacagatacgatgatgatgtagaaaatggatttattggattggatacactaaaattaaacattgttcatgatatagttgaaccatgtatgcctgttcgtaggccagtggctaagatactgtgtaaagaaatggtaaataaatactttgagaatccgctacatattattggtaaaaatcttcaagagtgcattgactttgttagtgaataggcatttcatctttctccaatactaattcaaattgttaaattaataatggatagtataaatagttattagtgataaaatagtaaaaataattattagaataagagtgtagtatcatagataactctcttctataaaaatggattttattcgtagaaagtatcttatatacacagtagaaaataatatagattttttaaaggatgatacattaagtaaagtaaacaattttaccctcaatcatgtactagctctcaagtatctagttagcaattttcctcaacatgttattactaaggatgtattagctaataccaatttttttgttttcatacatatggtacgatgttgtaaagtgtacgaagcggttttacgacacgcatttgatgcacccacgttgtacgttaaagcattgactaagaattatttatcgtttagtaacacaatacaatcgtacaaggaaaccgtgcataaactaacacaagatgaaaaatttttagaggttgccaaatacatggacgaattaggagaacttataggcgtaaattatgacttagttcttaatccattatttcacggaggggaacccatcaaagatatggaaatcatttttttaaaactgtttaagaaaacagacttcaaagttgttaaaaaattaagtgttataagattacttatttgggcttacctaagcaagaaagatacaggcatagagtttgcggataatgatagacaagatatatatactctatttcaacaaactggtagaatcgtccatagcaatctaacagaaacgtttagagattatatctttcccggagataagactagctattgggtgtggttaaacgaaagtatagctaatgatgcggatattgttcttaatagacacgccattaccatgtatgataaaattcttagttatatatactctgagataaaacaaggacgcgttaataaaaacatgcttaagttagtttatatctttgagcctgaaaaagatatcagagaacttctgctagaaatcatatatgatattcctggagatatcctatctattattgatgcaaaaaacgacgattggaaaaaatattttattagtttttataaagctaattttattaacggtaatacatttattagtgatagaacgtttaacgaggacttattcagagttgttgttcaaatagatcccgaatatttcgataatgaacgaattatgtctttattctctacgagtgctgcggacattaaacgatttgatgagttagatattaataacagttatatatctaatataatttatgaggtgaacgatatcacattagatacaatggatgatatgaagaagtgtcaaatctttaacgaggatacgtcgtattatgttaaggaatacaatacatacctgtttttgcacgagtcggatcccatggtcatagagaacggaatactaaagaaactgtcatctataaaatccaagagtagacggctgaacttgtttagcaaaaacattttaaaatattatttagacggacaattggctcgtctaggtcttgtgttagatgattataaaggagacttgttagttaaaatgataaaccatcttaagtctgtggaggatgtatccgcattcgttcgattttctacagataaaaaccctagtattcttccatcgctaatcaaaactattttagctagttataatatttccatcatcgtcttatttcaaaggtttttaagagataatctatatcatgtagaagaattcttggataaaagcatccatctaaccaagacggataagaaatatatacttcaattgataagacacggtagatcatagaacagaccaaatatattattaataatttgtatatacatagatataattatcacatattaaaaattcacacatttttgataaatgggaactgctgcaacaattcagactcccaccaaattaatgaataaagaaaatgcagaaatgattttggaaaaaattgttgatcatatagttatgtatattagtgacgaatcaagtgattcagaaaataatcctgaatatattgattttcgtaacagatacgaagactatagatctctcattataaaaagtgatcacgagtttgtaaagctatgtaaaaatcatgcagagaaaagttctccagaaacgcaacaaatgattatcaaacacatatacgaacaatatcttattccagtatctgaagtactattaaaacctataatgtccatgggtgacataattacatataacggatgtaaagacaatgaatggatgctagaacaactctctaccctaaactttaacaatctccgcacatggaactcatgtagcataggcaatgtaacgcgtctgttttatacattttttagttatctgatgaaagataaactaaatatataagtataatcccattctaatactttaacctgatgtattagcatcttattagaatattaacctaactaaaagacataacataaaaactcattacatagttgataaaaagcggtaggatataaatattatggctgccaccgttccgcgttttgacgacgtgtacaaaaatgcacaaagaagaattctagatcaagaaacattttttagtagaggtctaagtagaccgttaatgaaaaacacatatctatttgataattacgcgtatggatggataccagaaactgcaatttggagtagtagatacgcaaacttagatgcaagtgactattatcccatttcgttgggattacttaaaaagttcgagtttctcatgtctctatataaaggtcctattccagtatacgaagaaaaagtaaatactgaattcattgctaatggatcgttctctggtagatacgtatcatatcttcgaaagttttctgctcttccaacaaacgagtttattagttttttgttactgacttccattccaatctataatatcttgttctggtttaaaaatactcagtttgatattactaaacacacattattcagatacgtctatacagataatgccaaacacctggcgttggctaggtatatgcatcaaacaggagactataagcctttgtttagtcgtctcaaagagaattatatatttaccggtcccgttccaataggtatcaaagatataaatcaccctaatcttagtagagcaagaagtccatccgattatgagacattagctaatattagtactatattgtactttaccaagtatgatccggtattaatgtttttattgttttacgtacctgggtattcaattactacaaaaattactccagccgtagaatatctaatggataaactgaatctaacaaagagcgacgtacaactgttgtaaattattttatgcttcgtaaaatgtaggttttgaaccaaacattctttcaaagaatgagatgcataaaactttattatccaatagattgactatttcggacgtcaatcgtttaaagtaaacttcgtaaaatattctttgatcactgccgagtttaaaacttctatcgataattgtttcatatgttttaatatttacaagttttttggtccatggtacattagccggacaaatatatgcaaaataatatcgttctccaagttctatagtttctggattatttttattatattcagtaaccaaatacatattagggttatctgcggatttataatttgagtgatgcattcgactcaacataaataattctagaggagacgatctactatcaaattcggatcgtaaatctgtttctaaagaacggagaatatctatacatacctgattagaattcatccgtccttcagacaacatctcagacagtctggtcttgtatgtcttaatcatattcttatgaaacttggaaacatctcttctagtttcactagtacctttattaattctctcaggtacagattttgaattcgacgatgccgagtatttcatcgttgtatatttcttcttcgattgcataatcagattcttatataccgcctcaaactctattttaaaattattaaacaatactctattattaatcagtcgttctaactcctttgctatttctatggacttatctacatcttgactgtctatctctgtaaacacggagtcggtatctccatacacgctacgaaaacgaaatctgtaatctataggcaacgatgttttcacaatcggattaatatctctatcgtccatataaaatggattacttaatggattggcaaaccgtaacataccgttagataactctgctccatttagtaccgattctagatacaagatcattctacgtcctatggatgtgcaactcttagccgaagcgtatgagtatagagcactatttctaaatcccatcagaccatatactgagttggctactatcttgtacgtatattgcatggaatcatagatggccttttcagttgaactggtagcctgttttaacatctttttatatctggctctctctgccaaaaatgttcttaatagtctaggaatggttccttctatcgatctatcgaaaattgctatttcagagatgaggttcggtagtctaggttcacaatgaaccgtaatatatctaggaggtggatatttctgaagcaagagctgattatttatttcttcttccaatctattggtactaacaacgacaccgactaatgtttccggagatagatttccaaagatacacacattaggatacagactgttataatcaaagattaatacattattactaaacattttttgttttggagcaaataccttaccgccttcataaggaaacttttgttttgtttctgatctaactaagatagttttagtttccaacaatagctttaacagtggacccttgatgactgtactcgctctatattcgaataccatggattgaggaagcacatatgttgacgcacccgcgtctgtttttgtttctactccataatactcccacaaatactgacacaaacaagcatcatgaatacagtatctagccatatctaaagctatgtttagattataatccttatacatctgagctaaatcaacgtcatcctttccgaaagataatttatatgtatcattaggtaaagtaggacataatagtacgactttaaatccattttcccaaatatctttacgaattactttacatataatatcctcatcaacagtcacataattacctgtggttaaaacctttgcaaatgcagcggctttgcctttcgcgtccgtagtatcgtcaccgatgaacgtcatttctctaactcctctatttaatactttacccatgcaactgaacgcgttcttggatatagaatccaatttgtacgaatccaatttttcagatttttgaatgaatgaatatagatcgaaaaatatagttccattattgttattaacgtgaaacgtagtattggccatgccgcctactcccttatgactagactgatttctctcataaatacagagatgtacagcttcctttttgtccggagatctaaagataatcttctctcctgttaataactctagacgattagtaatatatctcagatcaaagttatgtccgttaaaggtaacgacatagtcgaacgttagttccaacaattgtttagctattcgtaacaaaactatttcagaacataaaactagttctcgttcgtaatccatttccattagtgactgtatcctcaaacatcctctatcgacggcttcttgtatttcctgttccgttaacatctcttcattaatgagcgtaaacaataatcgtttaccacttaaatcgatataacagtaacttgtatgcgagattgggttaataaatacagaaggaaacttcttatcgaagtgacactctatatctagaaataagtacgatcttgggatatcgaatctaggtatttttttagcgaaacagttacgtggatcgtcacaatgataacatccattgttaatctttgtcaaatattgctcgtccaacgagtaacatccgtctggagatatcccgttagaaatataaaaccaactaatattgagaaattcatccatggtggcattttgtatgctgcgtttctttggctcttctatcaaccacatatctgcgacggagcattttctatctttaatatctagattataacttattgtctcgtcaatgtctatagttctcatctttcccaacggcctcgcattaaatggaggaggagacaatgactgatatatttcgtccgtcactacgtaataaaagtaatgaggaaatcgtataaatacggtctcaccatttcgacatctggatttcagatataaaaatctgttttcaccgtgactttcaaaccaattaatgcaccgaacatccatttatagaatttagaaatatattttcatttaaatgaatcccaaacattggggaagagccgtatggaccattatttttatagtactttcgcaagcgggtttagacggcaacatagaagcgtgtaaacgaaaactatatactatagttagcactcttccatgtcctgcatgtagacggcacgcgactatcgctatagaggacaataatgtcatgtctagcgatgatctgaattatatttattattttttcatcagattatttaacaatttggcatctgatcccaaatacgcgatcgatgtgacaaaggttaaccctttataaacttaacccattataaaacttatgattagtcacgactgaaataaccgcgtgattattttttggtataattctacacggcatggtttctgtgactatgaattcaacccccgttacattagtgaaatctttaacaaacagcaagggttcgtcaaagacataaaactcattgtttacaatcgaaatagaccccctatcacacttaaaataaaaaatatccttatcctttaccaccaaataaaattctgattggtcaatgtgaatgtattcacttaacagttccacaaatttatttattaactccgaggcacatacatcgtcggtattttttatggcaaactttactcttccagcatccgtttctaaaaaaatattaacgagttccatttatatcatccaatattattgaaatgacgttgatggacaaatgatacaaataagaaggtacggtacctttgtccaccatctcctccaattcatgctctattttgtcattaactttaatgtatgaaaacagtacgccacatgcttccatgacagtgtgtaacactttggatacaaaatgtttgacattagtataattgttcaagactgtcaatctataatagatagtagctataatatattctatgatggtattgaagaagatgacaaccttggcatattgatcatttaacacagacatggtatcaacagatagcttgaatgaaagagaatcagtaattggaataagcgtcttctcgatggagtgtccgtataccaacatgtctgatattttgatgtattccattaaattatttagttttttctttttattctcgttaaacagcatttctgtcaacggaccccaacatcgttgaccgattaagttttgattgatttttccgtgtaaggcgtatctagtcagatcgtatagcctatccaataatccatcgtctgtgtgtagatcacatcgtacactttttaattctctatagaagagcgacagacatctggagcaattacagacagcaatttctttattctctacagatgtaagatacttgaagacattcctatgatgatgcagaattttggataacacggtattgatggtatctgttaccataattcctttgatggctgatagtgtcagagcacaagatttccaatctttgacaatttttagcaccattatctttgttttgatatctatatcagacagcatggtgcgtctgacaacacaaggattaagacggaaagatgaaatgattctctcaacatcttcaatggataccttgctattttttctggcattatctatatgtgcgagaatatcctctagagaatcagtatcctttttgatgatagtggatctcaatgacatgggacgtctaaaccttcttattctatcaccagattgcatggtgatttgtcttctttcttttatcataatgtaatctctaaattcatcggcaaattgtctatatctaaaatcataatatgagatgtttacctctacaaatatctgttcgtccaatgttagagtatttacatcagttttgtattccaaattaaacatggcaacggatttaattttatattcctctattaagtcctcgtcgataataacagaatgtagataatcatttaatccatcgtacatggttggaagatgctcgttgacaaaatctttaattgtcttgatgaaggtgggactatatctaacatcttgattaataaaatttataacattgtccataggatactttgtaactagttttatacacatctcttcatcggtaagtttagacagaatatcgtgaacaggtggtatattatattcatcagatatacgaagaacaatgtccaaatctatattgtttaatatattatatagatgtagtgtagctcctacaggaatatctttaactaagtcaatgatttcatcaaccgttagatctattttaaagttaatcatataggcattgatttttaaaaggtatgtagccttgactacattctcattaattaaccattccaagtcactgtgtgtaagaagattatattctatcataagcttgactacatttggtcccgataccattaaagaattcttatgatataaggaaacagattttaggtactcatctactctacaagaattttggagagccttaacgatatcagtgacgtttattatttcaggaggaaaaaacctaacattgagaatatcggaattaatagcttccagatacagtgattttggcaatagtccgtgtaatccataatccagtaacacgagctggtgcttgctagacaccttttcaatgtttaatttttttgaaataagctttgataaagccttcctcgcaaattccggatacatgaacatgtcggcgacatgattaagtattgttttttcattatttttatattttctcaacaagttctcaataccccaatagatgatagaatatcacccaatgcgtccatgttgtctatttccaacaggtcgctatatccaccaatagaagttttcccaaaaaagattctaggaacagttctaccaccagtaatttgttcaaaatagtcacgcaattcattttcgggtttaaattctttaatatcgacaatttcatacgctcctcttttgaaactaaacttatttagaatatccagtgcatttctacaaaaaggacatgtatacttgacaaaaattgtcactttgttattggccaacctttgttgtacaaattcctcggccattttaatatttaagtgatataaaactatctcgacttatttaactctttagtcgagatatatggacgcagatagctatatgatagccaactacagaaggcaaacgctataaaaaacataattacgacgagcatatttataaatatttttattcagcattacttgatatagtaatattaggcacagtcaaacattcaaccactctcgatacattaactctctcattttctttaacaaattctgcaatatcttcgtaaaaagattcttgaaactttttagaatatctatcgactctagatgaaatagcgttcgtcaacatactatgttttgtatacataaaggcgcccattttaacagtttctagtgacaaaatgctagcgatcctaggatcctttagaatcacatagattgacgattcgtctctcttagtaactctagtaaaataatcatacaatctagtacgcgaaataatattatccttgacttgaggagatctaaacaatctagttttgagaacatcgataagttcatcgggaatgacatacatactatctttaatagaactcttttcatccagttgaatggattcgtccttaaccaactgattaatgagatcttctattttatcattttccagatgatatgtatgtccattaaagttaaattgtgtagcgcttctttttagtctagcagccaatactttaacatcactaatatcgatatacaaaggagatgatttatctatggtattaagaattcgtttttcgacatctgtcaaaaccaattcctttttgcctgtatcatccagttttccatcctttgtaaagaaattattttctactagactattaataagactgataaggattcctccataattgcacaatccaaactttttcacaaaactagactttacaagatctacaggaatgcgtacttcaggtttcttagcttgtgattttttcttttgtggacattttcttgtgaccaactcatctaccatttcattgattttagcagtgaaataagctttcaatgcacgggcactgatactattgaaaacgagttgatcttcaaattccgccatttaagttcaccaaacaacttttaaatacaaatatatcaatagtagtagaataagaactataaaaaaaataataattaaccaataccaaccccaacaaccggtattattagttgatgtgactgttttctcatcacttagaacagatttaacaatttctataaagtctgtcaaatcatcttccggagaccccataaatacaccaaatatagcggcgtacaacttatccatttatacattgaatattggcttttctttatcgctatcttcatcatattcatcatcaatatcaacaagtcccagattacgagccagatcttcttctacattttcagtcattgatacacgttcactatctccagagagtccgataacgttagccaccacttctctatcaatgattagtttcttgagtgcgaatgtaatttttgtttccgttccggatctatagaaaactacaggtgtgataattgccttggccaattgtctttctcttttactgagtgattctagttcaccttctatagatctgagaatggatgattctccagtcgaaacatattctaccatggctccgtttaatttgttgatgaagatggattcatccttaaatgttttctctgtaatagtttccaccgaaagactatgcaaagaatttggaatgcgttccttgtgcttaatgtttccatagacggcttctagaagttgatacaacataggactagccgcggtaacttttatttttagaaagtatccatcgcttctatcttgtttagatttatttttataaagtttagtctctccttccaacataataaaagtggaagtcatttgactagataaactatcagtaagttttatagagatagacgaacaattagcgtattgagaagcatttagtgtaacgtattcgatacattttgcattagatttactaatcgattttgcatactctataacacccgcacaagtctgtagagaatcgctagatgcagtaggtcttggtgaagtttcaactctcttcttgattaccttactcatgattaaacctaaataattgtactttgtaatataatgatatatattttcactttatctcatttgagaataaaaatgtttttgtttaaccactgcatgatgtacagatttcggaatcacaaaccaccggtggttttattttatccttgtccaatgtgaattgaatgggagcggatgcgggtttcgtacgtagatagtacattcccgtttttagaccgagactccatccgtaaaaatgcatactcgttagtttggaataactcggatctgctatatggatattcatagattgactttgatcgatgaaggctcccctgtctgcagccatttttatgatcgtcttttgtggaatttcccaaatagttttataaactcgcttaatatcttctggaaggtttgtattctgaatggatccaccatctgccataatcctattcttgatctcatcattccataattttctctcggttaaaactctaaggagatgcggattaactacttgaaattctccagacaatactctccgagtgtaaatattactggtatacggttccaccgactcattatttcccaaaatttgagcagttgatgcagtcggcataggtgccaccaataaactatttctaagaccgtatgttctgattttatcttttagaggttcccaattccaaagatccgacggtacaacattccaaagatcatattgtagaataccgttactggcgtacgatcctacatatgtatcgtatggtccttccttctcagctagttcacaactcgcctctaatgcaccgtaataaatggtttcgaagatcttcttatttagatcttgtgcttccaggctatcaaatggataatttaagagaataaacgcgtccgctaatccttgaacaccaataccgataggtctatgtctcttattagagatttcagcttctggaataggataataattaatatctataattttattgagatttctgacaattactttgaccacatccttcagtttgagaaaatcaaatcgcccatctattacaaacatgttcaaggcaacagatgccagattacaaacggctacctcattagcatccgcatattgtattatctcagtgcaaagattactacacttgatagttcctaaattttgttgattactctttttgttacacgcatccttataaagaatgaatggagtaccagtttcaatctgagattctataatcgctttccagacgactcgagcctttattatagatttgtatctcctttctctttcgtatagtgtatacaatcgttcgaactcgtctccccaaacattgtccaatccaggacattcatccggacacatcaacgaccactctccgtcatccttcactcgtttcataaagagatcaggaatccaaagagctataaatagatctctggttctatgttcctcgtttcctgtattctttttaagatcgaggaacgccataatatcagaatgccacggttccaagtatatggccataactccaggccgtttgtttcctccctgatctatgtatctagcggtgttattataaactctcaacattggaataataccgtttgatataccattggtaccggagatatagcttccactggcacgaatattactaattgatagacctattccccctgccattttagagattaatgcgcatcgttttaacgtgtcatagataccctctatgctatcatcgatcatgttaagtagaaaacagctagacatttggtgacgactagttcccgcattaaataaggtaggagaagcgtgcgtaaaccatttttcagaaagtagattgtacgtctcaatagctgagtctatatcccattgatgaattcctactgcgacacgcattaacatgtgctgaggtctttcaacgatcttgttgtttattttcaacaagtaggatttttccaaagttttaaaaccaaaatagttgtatgaaaagtctcgttcgtaaataataaccgagttgagtttatccttatatttgttaactatatccatggtgatacttgaaataatcggagaatgtttcccatttttaggattaacatagttgaataaatcctccatcacttcactaaatagtttttttgtttccttgtgtagatttgatacggctattctggcggctagaatggcataatccggatgttgtgtagtacaagtggctgctatttcggctgccagagtgtccaattctaccgttgttactccattatatattccttgaataaccttcatagctattttaataggatctatatgatccgtgtttaagccataacataattttctaatacgagacgtgattttatcaaacatgacattttccttgtatccatttcgtttaatgacaaacatttttgttggtgtaataaaaaaattatttaacttttcattaatagggatttgacgtacgtagcgtacaaaatgattgttcctggtatatagataaagagtcctatatatttgaaaatcgttacggctcgattaaactttaatgattgcatagtgaatatatcattaggatttaactccttgactatcagggcggcaccagaaattaccatcaaaagcattaatacagttatgcctatcgcagttagaacggttatagcatccaccatttatatctaaaaattagatcaaagaatatgtgacaaagtcctagttgtatattgagaattgacaaaacaatgtttcttacatattttttttttattagtaaccgacttaatagtaggaactggaaaactagacttgattattctataagtatagatacccttccaaataatattctctttgataaaagttccagaaaatgtagaattttttaaaaagttatcttttgctattaccaagattgtgtttagacgcttattattaatatgagtgatgaaatccacaccgcctctagatatcgcctttatttccacattagatggtaaatccaatagtgaaactatctttttaggaatgtatggactcgcgtttagaggagtgaacgtcttgggcgtcggaaaggatgattcgtcaaacgaataaacaatttcacaaatggatgttaatgtattagtaggaaattttttgacgctagtggaattgaaaattctaatggatgatgttctacctatttcatccgataacatgttaatttccgacaccaacggttttaatatttcgatgatatacggtagtctctctttcggacttatatagcttattccacaatacgagtcattatatactccaaaaaacaaaataactagtataaaatctgtatcgaatgggaaaaacgaaattatcgacataggtatagaatccggaacattgaacgtattaatacttaattctttttctgtggtaagtaccgataggttattgacattgtatggttttaaatattctataacttgagacttgatagatattagtgatgaattgaaaattatttttatcaccacgtgtgtttcaggatcatcgtcgacgcccgtcaaccaaccgaacggagtaaaataaatatcattaatatatgctctagatattagtatttttatcaatcctttgattatcatcttctcgtaggcgaatgattccatgatcaagagtgatttaagaacatcctccggagtattaatgggcttagtaaacagtccatcgttgcaataataaaagttatccaagttaaaggatattatgcattcgtttaaagatatcacctcatctgacggagacaattttttggtaggttttagagactttgaagctacttgtttaacaaagttattcatcgtcgtttactattctatttaattttgtagttaatttatcacatatcacattaattgactttttggtccatttttccatacgtttatattcttttaatcctgcgttatccgtttccgttatatccagtgatagatcgtgcaggttaaatagaatgctcttaaataatgtcatttttttatccgctaaaaatttaaagaatgtataaacttttttcaaagatttaaaacttttaggtggtgtcctagtacacaatatcataaacaaactaataaacatcccgcattcagattccaacagctgattaacttccacattaatacagcctattttcgctccaaatgtacattcgaaaaatctgaataaaacatcaatgtcgcaatttgtattatccaatacagaatgtttgtgattcgtgttaaaaccatcggagaaggaatagaaataaaaattattatagtggtggaattcagttggaatattgcctccggagtcataaaaggatactaaacattgttttttatcataaattacacatttccaatgagacaaataacaaaatccaaacattacaaatctagaggtagaacttttaattttgtctttaagtatatacgataagatatgtttattcataaacgcgtcaaatttttcatgaatcgctaaggagtttaagaatctcatgtcaaattgtcctatataatccacttcggatccataagcaaactgagagactaagttcttaatacttcgattgctcatccaggctcctctctcaggctctattttcatcttgacgacctttggattttcaccagtatgtattcctttacgtgataaatcatcgattttcaaatccatttgtgagaagtctatcgccttagatactttttcccgtagtcgaggtttaaagaaatacgctaacggtatactagtaggtaactcaaaaacatcatatatagaatggtaacgcgtctttaactcgtcggttaactctttcttttgatcgagttcgtcgctactattgggtctgctcaggtgccccgactctactagttccaacatcataccgataggaatacaagacactttgccggcggttgtagatttatcatatttttccactacatatccgttacaatttgttaaaaatttagatacatctatattgctacataatccagctagtgaatatatatgacataataaattggtaaatcctagttctggtattttactaattactaaatctgtatatctttccatttatcatggaaaagaatttaccagatatcttcttttttccaaactgcgttaatgtattctcttacaaatattcacaagatgaattcagtaatatgagtaaaacggaacgtgatagtttctcattggccgtgtttccagttataaaacatagatggcataacgcacacgttgtaaaacataaaggaatatacaaagttagtacagaagcacgtggaaaaaaagtatctcctccatcactaggaaaacccgcacacataaacctaaccgcgaagcaatatatatacagtgaacacacaataagctttgaatgttatagttttctaaaatgtataacaaatacagaaatcaattcgttcgatgagtatatattaagaggactattagaagctggtaatagtttacagatattttccaattccgtaggtaaacgaacagatactataggtgtactagggaataagtatccatttagcaaaattccattggcctcattaactcctaaagcacaacgagagatattttcagcgtggatttctcatagacctgtagttttaactggaggaactggagtgggtaagacgtcacaggtacccaagttattgctttggtttaattatttatttggtggattctctactctagataaaatcactaactttcacgaaagaccagtcattctatctcttcctaggatagctttagttagattgcatagcaataccattttaaaatcattgggatttaaggtactagatggatctcctatttctttacggtacggatctataccggaagaattaataaacaaacaaccaaaaaaatatggaattgtattttctacccataagttatctctaacaaaactatttagttatggcactcttattatagacgaagttcatgagcatgatcaaataggagatattattatagcagtagcgagaaagcatcatacgaaaatagattctatgtttttaatgactgccacgttagaggatgaccgagaacggctaaaagtatttttacctaatcccgcatttatacatattcctggagatacactgtttaaaattagcgaggtatttattcataataagataaatccatcttccagaatggcatacatagaagaagaaaagagaaatttagttactgctatacagatgtatactcctcctgatggatcatccggtatagtctttgtggcatccgttgcacagtgtcacgaatataaatcatatttagaaaaaagattaccgtatgatatgtatattattcatggtaaggtcttagatatagacgaaatattagaaaaagtgtattcatcacctaatgtatcgataattatttctactccttatttggaatccagcgttactatacgcaatgttacacacatttatgatatgggtaaagtttttgtccccgctccttttggaggatcgcaagaatttatttctaaatctatgagagatcaacgaaaaggaagagtaggaagagttaatcctggtacatacgtctatttctatgatctgtcttatatgaagtctatacagcgaatagattcagaatttctacataattatatattgtacgctaataagtttaatctaacactccccgaagatttgtttataatccctacaaatttggatattctatggcgtacaaaggaatatatagactcgttcgatattagtacagaaacatggaataaattattatccaattattatatgaagatgatagagtatgctaaactttatgtactaagtcctattctcgctgaggagttggataactttgagaggacgggagaattaactagtattgtacgagaagccattttatctctaaatttacgaattaagattttaaattttaaacataaagatgatgatacgtatatacacttttgtaaaatattattcggtgtctataacggaacaaacgctactatatattatcatagacctctaacgggatatatgaatatgatttcagatactatatttgttcctgtagataataactaaaaatcaaactctaatgaccacatctttttttagagatgaaaaattttctacatctccttttgtagacacgactaaacattttgcaaaaaaaagtttattagtgtttagataatcgtatacttcatcagtgtagatagtaaatgtgaacaaataaaaggtattcttactcaatagattggtaaattccatagaatatattaatcctttcttcttgagatcccacatcatttcaaccagagacgttttatccaatgatttacctcgtactataccacatacaaaactagattttgcagtgacgtcgtacctggtattcctaccaaacaaaattttacttttagttcttttagaaaattctaaggtagaatctctatttgccaatatgtcatctatggaattaccactagcaaaaaatgatagaaatatatattgatacatcgcagctggttttgatctactatactttaaaaacgaatcagattccataattgcctgtatatcatcagctgaaaaactatgttttacacgtattccttcggcatttctttttaatgatatatcttgtttagacaatgataaagttatcatgtccatgagagacgcgtctccgtatcgtataaatatttcattagatgttagacgcttcattaggggtatacttctataaggtttcttaatcagtccatcattggttgcgtcaagaactactatcggatgttgttgggtatctctagtgttacacatggccttactaaagtttgggtaaataactatgatatctctattaattatagatgcatatatttcattcgtcaaggatattagtatcgacttgctatcgtcattaatacgtgtaatgtaatcatataaatcatgcgatagccaaggaaaattcaaatagatgttcatcatataatcgtcgctataattcatattaatacgttgacattgactaatttgtaatatagcctcgccacgaagaaagctctcgtattcagtttcatcgataaaggataccgttaaatataactggttgccgatagtctcatagtctattaagtggtaagtttcgtacaaatacagaatccctaaaatattatctaatgttggattaatctttaccataactgtataaaatggagacggagtcataactattttaccgtttgtacttactggaatagacgaaggaataatctccggacatgctggtaaagacccaaatgtctgtttgaagaaatccaatgttccaggtcctaatctcttaacaaaaattacgatattcgatcccgatatcctttgcattctatttaccagcatatcacgaactatattaagattatctatcatgtctattctcccaccgttatataaatcgcctccgctaagaaacgttagtatatccatacaatggaatacttcatttctaaaatagtattcgttttctaattctttaatgtgaaatcgtatactagaaagggaaaaattatctttgagttttccgttagaaaagaaccacgaaactaatgttctgattgcgtccgattccgttgctgaattaatggatttacaccaaaaactcatataacttctagatgtagaagcattcgctaaaaaattagtagaatcaaaggatataagtagatgttccaacaagtgagcaattcccaagatttcatctatatcattctcgaatccgaaattagaaattcccaagtagatatcctttttcatccgatcgttgatgaaaatacgaactttattcggtaagacaatcatttactaaggagtaaaataggaagtaatgttcgtatgtcgttatcatcgtataaattaaaggtgtgttttttaccattaagtgacattataattttaccaatattggaattataatataggtgtatttgcgcactcgcgacggttgatgcatcggtaaatatagctgtatctaatgttctagtcggtatttcatcatttcgctgtctaataatagcgttttctctatctgtttccattacagctgcctgaagtttattggtcggataatatgtaaaataataagaaatacatacgaataacaaaaataaaataagatataataaagatgccatttagagatctaattttgttcaacttgtccaaattcctacttacagaagatgaggaatcgttggagatagtgtcttccttatgtagaggatttgaaatatcttatgatgacttgataacttactttccagataggaaataccataaatatatttctaaagtatttgaacatgtagatttatcggaggaattaagtatggaattccatgatacaactttgcgagatttagtctatcttagattgtacaagtattccaagtgtatacggccgtgttataaattaggagataatctaaaaggcatagttgttataaaggacaggaatatttatattagggaagcaaatgatgacttgatagaatatctcctcaaggaatacactcctcagatttatacatattctaatgagcgcgtccccataactggttcaaaattaattctttgtggattttctcaagttacatttatggcgtatacaacgtcgcatataacaacaaataaaaaggtagatgttctcgtttccaaaaaatgtatagatgaactagtcgatccaataaattatcaaatacttcaaaatttatttgataaaggaagcggaacaataaacaaaatactcaggaagatattttattcggtaacaggtggccaaactccataggtagctttttctatttcggattttagaatttccaaattcaccagcgatttatctgttttggtgaaatccaaggatttattaatgtccacaaatgccatttgttttgtctgtggattgtatttgaaaatggaaacgatgtagttagatagatgcgctgcgaagtttcctattagggttccgcgcttcacgtcacccagcatacttgaatcaccatcctttaaaaaaaatgataagatatcaacatggagtatatcatactcggattttaattcttctactgcatcactgacattttcacaaatactacaatacggtttaccgaaaataatcagtacgttcttcatttatgggtatcaaaaacttaaaatcgttactgctggaaaataaatcactgacgatattagatgataatttatacaaagtatacaatggaatatttgtggatacaatgagtatttatatagccgtcgccaattgtgtcagaaacttagaagagttaactacggtattcataaaatacgtaaacggatgggtaaaaaagggagggcatgtaaccctttttatcgatagaggaagtataaaaattaaacaagacgttagagacaagagacgtaaatattctaaattaaccaaggacagaaaaatgctagaattagaaaagtgtacatccgaaatacaaaatgttaccggatttatggaagaagaaataaaggcagaaatgcaattaaaaatcgataaactcacatttcaaatatatttatctgattctgataacataaaaatatcattgaatgagatactaacacatttcaacaataatgagaatgttacattattttattgtgatgaacgagacgcagaattcgttatgtgtctcgaggctaaaacacatttctctaccacaggagaatggccgttgataataagtaccgatcaggatactatgctatttgcatctgctgataatcatcctaagatgataaaaaacttaactcaactgtttaaatatgttccatctgcagaggataactatttagcaaaattaacggcgttagtgaatggatgtgatttctttcctggactctatggggcatctataacacccaacaacttaaacaaaatacaattgtttagtgattttacaatcgataatatagtcactagtttggcaattaaaaattattatagaaagactaactctaccgtagacgtgcgtaatattgttacgtttataaacgattacgctaatttagacgatgtctactcgtatattcctccttgtcaatgcactgttcaagaatttatattttccgcattagatgaaaaatggaatgaatttaaatcatcttatttagaaagcgtgccgttaccctgccaattaatgtatgcgttagaaccacgcaaggagattgatgtttcagaagttaaaactttatcatcttatatagatttcgaaaatactaaatcagatatcgatgttataaaatctatatcctcgatcttcggatattctaacgaaaactgtaacacgatagtattcggcatctataaggataatttactactgagtataaatagttcattttactttaacgatagtctgttaataaccaatactaaaagtgataatataataaatataggttactagattaaaaatggtgttccaactcgtgtgctctacgtgcggcaaagatatttctcacgaacgatataaattgattatacgaaaaaaatcattaaaggatgtactcgtcagtgtaaagaacgaatgttgtaggttaaaattatctacacaaatagaacctcaacgtaacttaacagtgcaacctctattggatataaactaatatggatccggttaattttatcaagacatatgcgcctagaggttctattatttttattaattataccatgtcattaacaagtcatttgaatccatcgatagaaaaacatgtgggtatttattatggtacgttattatcggaacacttggtagttgaatcaacatatagaaaaggagttcgaatagtcccattggatagtttttttgaaggatatcttagtgcaaaagtatacatgttagagaatattcaagttatgaaaatagcagctgatacgtcattaactttattgggtattccgtatggatttggtcatgatagaatgtattgttttaaattggtagctgactgttataaaaatgccggtattgatacatcgtctaaacgaatattaggtaaagatatttttctgagccaaaacttcacagacgataatagatggataaagatatatgattctaataatttaacattttggcaaattgattaccttaaagggtgagttaatatgcataactactcctccgttgttttttccctcgttctttttcttaacgttgtttgccatcactctcataatgtaaagatattctaaaatggtaaacttttgcatatcggacgcagaaattggtataaatgttgtaattgtattatttcccgtcaatggactagtcacagctccatcagttttatatcctttagagtatttctcactcgtgtctaacattctagagcattccatgatctgtttatcgttgatattggccggaaagatagattttttattttttattatattactattggcaattgtagatataacttctggtaaatatttttctaccttttcaatctcttctattttcaagccggctatatattctgctatattgttgctagtatcaataccttttctggctaagaagtcatatgtggtattcactatatcagttttaactggtagttccattagcctttccacttctgcagaataatcagaaattggttctttaccagaaaatccagctactataataggctcaccgatgatcattggcaaaatcctatattgtaccagattaatgagagcatatttcatttccaataattctgctagttcttgagacattgatttatttgatgaatctagttggttctctagatactctaccatttctgccgcatacaataacttgttagataaaatcagggttatcaaagtgtttagcgtggctagaatagtgggcttgcatgtattaaagaatgcggtagtatgagtaaaccgttttaacgaattatatagtctccagaaatctgtggcgttacatacatgagccgaatgacatcgaagattgtccaatatttttaatagctgctctttgtccattatttctatatttgactcgcaacaattgtagataccattaatcaccgattcctttttcgatgccggacaatagcacaattgtttagctttggactctatgtattcagaattaatagatatatctcttaatacagattgcactatacattttgaaactatgtcaaaaattgtagaacgacgctgttctgcagccatttaactttaaataatttacaaaaatttaaaatgagcatccgtataaaaatcgataaactgcgccaaattgtggcatatttttcagagttcagtgaagaagtatctataaatgtagactcgacggatgagttaatgtatatttttgccgccttgggcggatctgtaaacatttgggccattatacctctcagtgcatcagtgttctaccgcggagccgaaaatattgtgtttaatcttcctgtgtccaaggtaaaatcgtgtttgtgtagttttcacaatgatgccatcatagatatagaacctgatctggaaaataatctagtaaaactttctagttatcatgtagtaagtgtcgattgtaataaggaactgatgcctattaggacagatactactatttgtctaagtatagatcaaaagaaatcttacgtgtttaattttcacaagtatgaagaaaaatgttgtggtagaaccgtcattcatttagaatggttgttgggctttatcaagtgtattagtcagcatcagcatttggctattatgtttaaagatgacaatattattatgaagactcctggtaatactgatgcattttccagggaatattctatgactgaatgttctcaagaactacaaaagttttctttcaaaatagctatctcgtctctcaacaaactacgaggattcaaaaagagagtcaatgtttttgaaactagaatcgtaatggataatgacgataacattttaggaatgttgttttcggatagagttcaatcctttaagatcaacatctttatggcgtttttagattaatactttcaatgagataaatatgggtggcggagtaagtgttgagctccctaaacgggatccgcctccgggagtacccactgatgagatgttattaaacgtggataaaatgcatgacgtgatagctcccgctaagcttttagaatatgtgcatataggaccactagcaaaagataaagaggataaagtaaagaaaagatatccagagtttagattagtcaacacaggacccggtggtctttcggcattgttaagacaatcgtataatggaaccgcacccaattgctgtcgcacttttaatcgtactcattattggaagaaggatggaaagatatcagataagtatgaagagggtgcagtattagaatcgtgttggccagacgttcacgacaccggaaaatgcgatgttgatttattcgactggtgtcagggggatacgttcgatagaaacatatgccatcagtggatcggttcagcctttaataggagtaatagaactgtagagggtcaacaatcgttaataaatctgtataataagatgcaaacattatgtagtaaagatgctagtgtaccaatatgtgaatcatttttgcatcatttacgcgcacacaatacagaagatagcaaagagatgatcgattatattctaagacaacagtctgcggactttaaacagaaatatatgagatgtagttatcccactagagataagttagaagagtcattaaaatatgcggaacctcgagaatgttgggatccagagtgttcgaatgccaatgttaatttcttgctaacacgtaattataataatttaggactttgcaatattgtacgatgtaatactagcgtgaacaacttacagatggataaaacttcctcattaagattgtcatgtggattaagcaatagtgatagattttctactgttcccgtcaatagagcaaaagtagttcaacataatattaaacactcgttcgacctaaaattgcatttgatcagtttattatctctcttggtaatatggatactaattgtagctatttaaatgggtgccgcggcaagcatacagacgacggtgaatacactcagcgaacgtatctcgtctaaattagaacaagaagcgaatgctagtgctcaaacaaaatgtgatatagaaatcggaaatttttatatccgacaaaaccatggatgtaacctcactgttaaaaatatgtgctctgcggacgcggatgctcagttggatgctgtgttatcagccgctacagaaacatatagtggattaacaccggaacaaaaagcatacgtgccagctatgtttactgctgcgttaaacattcagacgagtgtaaacactgttgttagagattttgaaaattatgtgaaacagacttgtaattctagcgcggtcgtcgataacaaattaaagatacaaaacgtaatcatagatgaatgttacggagccccaggatctccaacaaatttggaatttattaatacaggatctagcaaaggaaattgtgccattaaggcgttgatgcaattgacgactaaggccactactcaaatagcacctaaacaagttgctggtacaggagttcagttttatatgattgttatcggtgttataatattggcagcgttgtttatgtactatgccaagcgtatgttgttcacatccaccaatgataaaatcaaacttattttagccaataaggaaaacgtccattggactacttacatggacacattctttagaacttctccgatggttattgctaccacggatatgcaaaactgaaaatatattgataatattttaatagattaacatggaagttatcactgatcgtctagacgatatagtgaaacaaaatatagcggatgaaaaatttgtagattttgttatacacggtctagagcatcaatgtcctgctatacttcgaccattaattaggttgtttattgatatactattatttgttatagtaatttatatttttacggtacgtctagtaagtagaaattatcaaatgttgttggcgttggtggcgctagtcatcacattaactattttttattactttatactataatagtactagactgacttctaacaaacatctcacctgccataaataaatgcttgatattaaagtcttctatttctaacactattccatctgtggaaaataatactctgacattatcgctaattgacacatcggtgagtgatatgcctataaagtaataatcttctttgggcacatataccagtgtaccaggttctaacaacctatttactggtgctcctatagcatactttttctttaccttgagaatatccatcgtttgcttggtcaatagcgatatgtgattttttatcaaccactcgaaaaagtaattggagtgttcatatcctctacgggctattgtctcatggccgtgtatgaaatttaagtaacacgactgtggtagatttgttctatagagccggttgccgcaaatagatagaactaccaatatgtctgtacaaatgttaaacattaattgattaacagaaaaaacaatgttcgttctgggaatagaaaccagatcaaaacaaaattcgttagaatatatgccacgtttatacattgaatataaaataactacagtttgaaaaataacagtatcatttaaacatttaacttgcggggttaatctcacaactttactgtttttgaactgttcaaaatatagcatagatccgtgagaaatacgtttagccgcctttaatagaggaaatcccaccgcctttctggatctcaccaacgacgatagttctgaccagcaactcatttcttcatcatccacctgttttaacatataataggcaggagatagatatccgtcattgcaatattccttctcgtaggcacacaatctaatattgataaaatctccattctcttctctgcatttattatcttgtttcggtggctgattaggctgtagtcttggtttaggctttggtatatcgttgttgaatctattttggtcattaaatctttcatttcttcctggtatatttttatcacctcgtttggttggatttttgtctatattatcgtttgtaacatcggtacgggtattcatttatcacaaaaaaaacttctctaaatgagtctactgctagaaaacctcatcgaagaagataccatattttttgcaggaagtatatctgagtatgatgatttacaaatggttattgccggcgcaaaatccaaatttccaagatctatgctttctatttttaatatagtacctagaacgatgtcaaaatatgagttggagttgattcataacgaaaatatcacaggagcaatgtttaccacaatgtataatataagaaacaatttgggtctaggagatgataaactaactattgaagccattgaaaactatttcttggatcctaacaatgaagttatgcctcttattattaataatacggatatgactgccgtcattcctaaaaaaagtggtaggagaaagaataagaacatggttatcttccgtcaaggatcatcacctatcttgtgtattttcgaaactcgtaaaaagattaatatttataaagaaaatatggaatccgcgtcgactgagtatacacctatcggagacaacaaggctttgatatctaaatatgcgggaattaatatcctaaatgtgtattctccttccacatccataagattgaatgccatttacggattcaccaataaaaataaactagagaaacttagtactaataaggaactagaatcgtatagttctagccctcttcaagaacccattaggttaaatgattttctgggactattggaatgtgttaaaaagaatattcctctaacagatattccgacaaaggattgattactataaatggagaatgttcctaatgtatactttaatcctgtgtttatagagcccacgtttaaacattctttattaagtgtttataaacacagattaatagttttatttgaagtattcgttgtattcattctaatatatgtattttttagatctgaattaaatatgttcttcatgcctaaacgaaaaatacccgatcctattgatagattacgacgtgctaatctagcgtgtgaagacgataaattaatgatctatggattaccatggatgacaactcaaacatctgcgttatcaataaatagtaaaccgatagtgtataaagattgtgcaaagcttttgcgatcaataaatggatcacaaccagtatctcttaacgatgttcttcgcagatgatgattcattttttaagtatttggctagtcaagatgatgaatcttcattatctgatatattgcaaatcactcaatatctagactttctgttattattattgatccaatcaaaaaataaattagaagccgtgggtcattgttatgaatctctttcagaggaatacagacaattgacaaaattcacagactttcaagattttaaaaaactgtttaacaaggtccctattgttacagatggaagggtcaaacttaataaaggatatttgttcgactttgtgattagtttgatgcgattcaaaaaagaatcctctctagctaccaccgcaatagatcctgttagatacatagatcctcgtcgtgatatcgcattttctaacgtgatggatatattaaagtcgaataaagtgaacaataattaattctttattgtcatcatgaacggcggacatattcagttgataatcggccccatgttttcaggtaaaagtacagaattaattagacgagttagacgttatcaaatagctcaatataaatgcgtgactataaaatattctaacgataatagatacggaacgggactatggacgcatgataagaataattttgaagcattggaagcaactaaactatgtgatgtcttggaatcaattacagatttctccgtgataggtatcgatgaaggacagttctttccagacattgtttaattctgtgagcgtatggcaaacggtaccgagctcaaaaattgaaaaactagcgtctttttttgctcgaagtcgaccaccatgagtgctcctaaactcctctctctgggctgtatcttcttccccttgctactttttcagcaggcccgggctcaattcccaagacagtgtgccactgttgaggctttgagaagtggtatgtgttgcccagacctgtcccctgtgtctgggcctgggacagaccgctgtggctcatcatcagggaggggcagatgtgaggcagtgactgcagactcccggccccacagccctcagtatccccatgatggcagagatgatcgggaggtctggcccttgcgcttcttcaataggacatgtcactgcaacggcaatttctcaggacacaactgtgggacgtgccgtcctggctggagaggagctgcctgtgaccagagggttctcatagtcaggagaaatcttctggacttaagtaaagaagaaaagaaccactttgtccgggccctggatatggcaaagcgcacaactcaccctttatttgtcattgccaccaggagatcagaagaaatactggggccagatggcaacacgccacaatttgagaacatttccatttataactactttgtttggacacactattactcagtcaaaaagactttccttggggtaggacaggaaagctttggtgaagtggatttctctcatgagggaccagcttttctcacatggcacaggtaccacctcctgcgtctggagaaagacatgcaggaaatgttgcaagagccttctttctcccttccttactggaattttgcaacggggaaaaatgtctgtgatatctgcacggatgacttgatgggatccagaagcaactttgattccactctaataagcccaaactctgtcttttctcaatggcgagtggtctgtgactccttggaagattatgataccctgggaacactttgtaacagcaccgaggatgggccaattaggagaaatccagctggaaatgtggccagaccaatggtgcaacgtcttcctgaaccacaggatgtcgctcagtgcttggaagttggtttatttgacacgcctcctttttattccaactctacaaacagtttccgaaacacagtggaaggttacagtgaccccacgggaaagtatgaccctgctgttcgaagtcttcacaatttggctcatctattcctgaatggaacagggggacaaacccatttgtctccaaatgatcctatttttgtcctcctgcacaccttcacagatgcagtctttgatgaatggctgaggagatacaatgctgatatatccacatttccattggaaaatgcccctattggacataatagacaatacaacatggtgccattctggcccccagtcaccaacacagaaatgtttgttactgctccagacaacctgggatacacttatgaaattcaatggccaagtcgggagtttagtgtacctgagataattgccatagcagtagttggcgctttgttactggttgcactcatttttgggactgcttcttatctgattcgtgccagacgcagtatggatgaagctaaccagcctctcctcactgatcagtatcaatgctatgctgaagaatatgaaaaactccagaatcctaatcagtctgtggtctaattaattaattaatttttatcgatctaattcaacaatgtctggagagctcggtttggaattagtgaaagcttaaaaattgaaattttattttttttttttggaatataaataagctcgaagtcgaccaccatgttcttggctgttttgtattgccttctgtggagtttccagatctctgatggccattttcctcgagcctgtgcctcctctaagaacttgttggcaaaagaatgctgcccaccatggatgggtgatgggagtccctgcggccagctttcaggcagaggttcctgccaggatatccttctgtccagtgcaccatctggacctcagttccccttcaaaggggtggatgaccgtgagtcctggccctctgtgttttataataggacctgccagtgctcaggcaacttcatgggtttcaactgcggaaactgtaagtttggatttgggggcccaaattgtacagagaagcgagtcttgattagaagaaacatttttgatttgagtgtctccgaaaagaataagttcttttcttacctcactttagcaaaacatactatcagctcagtctatgtcatccccacaggcacctatggccaaatgaacaatgggtcaacacccatgtttaatgatatcaacatctacgacctctttgtatggatgcattactatgtgtcaagggacacactgcttgggggctctgaaatatggagggacattgattttgcccatgaagcaccagggtttctgccttggcacagacttttcttgttattgtgggaacaagaaattcgagaactaactggggatgagaacttcactgttccatactgggattggagagatgcagaaaactgtgacatttgcacagatgagtacttgggaggtcgtcaccctgaaaatcctaacttactcagcccagcatccttcttctcctcctggcagatcatttgtagcagatcagaagagtataatagccatcaggttttatgcgatggaacacctgagggaccactattacgtaatcctggaaaccatgacaaagccaaaacccccaggctcccatcttcagcagatgtggaattttgtctgagtttgacccagtatgaatctggatcaatggatagaactgccaatttcagctttagaaacacactggaaggatttgccagtccactcacagggatagcagatccttctcaaagtagcatgcacaatgccttacatatctttatgaatggaacaatgtcccaagtacagggatcggccaacgatcccatttttcttcttcaccatgcttttgtggacagtatttttgaacaatggctgcgaaggcaccgccctcttttggaagtttacccagaagccaatgcacctatcggccataacagagactcttacatggttcctttcataccgctctatagaaatggtgatttcttcataacatccaaggatctgggatatgactacagctacctccaagagtcagatccaggcttttacagaaattatattgagccttacttggaacaagccagtcgtatctggccatggcttcttggggcagcactggtgggagctgttattgctgcagctctctctgggcttagcagtaggctatgccttcagaagaagaagaagaagaagcaaccccaggaggaaaggcagccactcctcatggacaaagacgactaccacagcttgctgtatcagagccatctgtgattaattaatttttatcgatctaattcaacaatgtctggagagctcggatccttctgtgagcgtatggcaaacgaaggaaaaatagttatagtagccgcactcgatgggacatttcaacgtaaaccgtttaataatattttgaatcttattccattatctgaaatggtggtaaaactaactgctgtgtgtatgaaatgctttaaggaggcttccttttctaaacgattgggtgaggaaaccgagatagagataataggaggtaatgatatgtatcaatcggtgtgtagaaagtgttacgtcggctcataatattatattttttatctaaaaaactaaaaataaacattgattaaattttaatataatacttaaaaatggatgttgtgtcgttagataaaccgtttatgtattttgaggaaattgataatgagttagattacgaaccagaaagtgcaaatgaggtcgcaaaaaaactgccgtatcaaggacagttaaaactattactaggagaattattttttcttagtaagttacagcgacacggtatattagatggtgccaccgtagtgtatataggatctgctcccggtacacatatacgttatttgagagatcatttctataatttaggagtgatcatcaaatggatgctaattgacggccgccatcatgatcctattttaaatggattgcgtgatgtgactctagtgactcggttcgttgatgaggaatatctacgatccatcaaaaaacaactgcatccttctaagattattttaatttctgatgtgagatccaaacgaggaggaaatgaacctagtacggcggatttactaagtaattacgctctacaaaatgtcatgattagtattttaaaccccgtggcgtctagtcttaaatggagatgcccgtttccagatcaatggatcaaggacttttatatcccacacggtaataaaatgttacaaccttttgctccttcatattcagctgaaatgagattattaagtatttataccggtgagaacatgagactgactcgagttaccaaatcagacgctgtaaattatgaaaaaaagatgtactaccttaataagatcgtccgtaacaaagtagttgttaactttgattatcctaatcaggaatatgactattttcacatgtactttatgctgaggaccgtgtactgcaataaaacatttcctactactaaagcaaaggtactatttctacaacaatctatatttcgtttcttaaatattccaacaacatcaactgaaaaagttagtcatgaaccaatacaacgtaaaatatctagcaaaaattctatgtctaaaaacagaaatagcaagagatccgtacgcagtaataaatagaaacgtactactgagatatactaccgatatagagtataatgatttagttactttaataaccgttagacataaaattgattctatgaaaactgtgtttcaggtatttaacgaatcatccataaattatactccggttgatgatgattatggagaaccaatcattataacatcgtatcttcaaaaaggtcataacaagtttcctgtaaattttctatacatagatgtggtaatatctgacttatttcctagctttgttagactagatactacagaaactaatatagttaatagtgtactacaaacaggcgatggtaaaaagactcttcgtcttcccaaaatgttagagacggaaatagttgtcaagattctctatcgccctaatataccattaaaaattgttagatttttccgcaataacatggtaactggagtagagatagccgatagatctgttatttcagtcgctgattaatcaattagtagagatgagataagaacattataataatcaataatatatcttatatctcgtttagaaaaatgctaatattaaaatagctaacgctagtaatccaatcggaagccatttgatatctataatagggtatctaatttcctgattcagatagcggacagctatattctcggtagctactcgtttggaatcacaaacattatttacatctaatttactatctgtaatggaaacgtttcccaatgaaatggtacaatccgatacattgcattttgttatatttttttttaaagaggctggtaacaacgcatcgcttcgtttacatggctcgtaccaacaataatagggtaatcttgtatctattcctatccgtactatgcttttatcaggataaatacatttacatcgtatatcgtctttgttagcatcacagaatgcataaatttgttcgtccgtcatgataaaaatttaaagtgtaaatataactattatttttatagttgtaataaaaagggaaatttgattgtataccttcggttctttaaaagaaactgacttgataaaaatggctgtaatctctaaggttacgtatagtctatatgatcaaaaagagattaatgctacagatattatcattagtcatgttaaaaatgacgacgatatcggtaccgttaaagatggtagactaggtgctatggatggggcattatgtaagacttgtgggaaaacggaattggaatgtttcggtcactggggtaaagtaagtatttataaaactcatatagttaagcctgaatttatttcagaaattattcgtttactgaatcatatatgtattcactgcggattattgcgttcacgagaaccgtattccgacgatattaacctaaaagagttatcgggacacgctcttaggagattaaaggataaaatattatccaagaaaaagtcatgttggaacagtgaatgtatgcaaccgtatcaaaaaattactttttcaaagaaaaaggtttgtttcgtcaacaagttggatgatattaacgttcctaattctctcatctatcaaaagttaatttctattcatgaaaagttttggccattattagaaattcatcaatatccagctaacttattttatacagactactttcccatccctccgttgattattagaccggctattagtttttggatagatagtatacccaaagaaaccaatgaattaacttacttattaggtatgatcgttaagaattgtaacttgaatgctgatgaacaggttatccagaaggcggtaatagaatacgatgatattaaaattatttctaataacacttccagtatcaatttatcatatattacatccggcaaaaataatatgattagaagttatatcgtcgcccgacgaaaagatcagacggctagatctgtaattggtcccagtacatctatcaccgttaatgaggtaggaatgcccgcatatattagaaatacacttacagaaaagatatttgttaatgcctttacagtggataaagttaaacaactattagcatcaaaccaagttaaattttactttaataaacgattaaaccaattaacaagaatacgccaaggaaagtttatcaaaaataaaatacatttattgcctggtgattgggtagaagtagctgttcaagaatatacaagtattatttttggaagacagccgtctctacatagatacaacgtcatcgcttcatctatcagagctaccgaaggagatactatcaaaatatctcccggaattgccaactctcaaaatgctgatttcgacggagatgaagaatggatgatattagaacaaaatcctaaagctgtaattgaacaaagtattcttatgtatccgacgacgttactcaaacacgatattcatggagcccccgtttatggatctattcaagatgaaatcgtagcagcgtattcattgtttaggatacaagatctttgtttagatgaagtattgaacatcttggggaaatatggaagagagttcgatcctaaaggtaaatgtaaattcagcggtaaagatatctatacttacttgataggtgaaaagattaattatccgggtctcttaaaggatggtgaaattattgcaaacgacgtagatagtaattttgttgtggctatgaggcatctgtcattggctggactcttatccgatcataagtcgaacgtggaaggtatcaactttattatcaagtcatcttatgtttttaagagatatctatctatttacggttttggggtgacattcaaagatctgagaccaaattcgacgttcactaataaattggaggccatcaacgtagaaaaaatagaacttatcaaagaagcatacgccaaatatctcaacgatgtaagagacgggaaaatagttccattatctaaagctttagaggcggactatgtggaatccatgttatccaacttgacaaatcttaatatccgagagatagaagaacatatgagacaaacgctgatagatgatccagataataacctcctgaaaatggccaaagcgggttataaagtaaatcctacagaactaatgtatattctaggtacgtatggacaacaaaggattgatggtgaaccagcagagactcgagtattgggtagagtcttaccttactatcttccagactctaaggatccagaaggaagaggttacattcttaattctttaacaaaaggattaacaggttctcaatattacttttcgatgctggttgcaagatctcaatctactgatatcgtctgtgaaacatcacgtaccggaacactggctagaaaaatcattaaaaagatggaggatatggtggtcgacggatacggacaagtagttataggtaatacgctcatcaagtacgccgccaattataccaaaattctaggctcagtatgtaaacctgtagatcttatctatccagatgagtccatgacttggtatttggaaattagtgctctgtggaataaaataaaacagggattcgtttactctcagaaacagaaacttgcaaagaagacattggcgccgtttaatttcctagtattcgtcaaacccaccactgaggataatgctattaaggttaaggatctgtacgatatgattcataacgtcattgatgatgtgagagagaaatacttctttacggtatctaatatagattttatggagtatatattcttgacgcatcttaatccttctagaattagaattacaaaagaaacggctatcactatctttgaaaagttctatgaaaaactcaattatactctaggtggtggaactcctattggaattatttctgcacaggtattgtctgagaagtttacacaacaagccctgtccagttttcacactactgaaaaaagtggtgccgtcaaacaaaaacttggtttcaacgagtttaataacttgactaatttgagtaagaataagaccgaaattatcactctggtatccgatgatatctctaaacttcaatctgttaagattaatttcgaatttgtatgtttgggagaattaaatccagacatcactcttcgaaaagaaacagataggtatgtagtagatataatagtcaatagattatacatcaagagagcagaaattaccgaattagtcgtcgaatatatgattgaacgattcatctcctttagcgtcattgtaaaggaatggggtatggaaacattcattgaggacgaggataatattagatttactgtctatctaaatttcgttgaaccagaggaattgaatcttagtaagtttatgatggttcttccgggggcagccaacaagggaaagattagtaaattcaagattcctatctctgattatacgggttatgacgacttcaatcaaacaaaaaagctcaataagatgactgtagaactcatgaatctaaaagaattaggttctttcgatttggaaaacgtcaacgtgtatcctggagtatggaatacatacgatatcttcggtatcgaggccgctcgtgaatacttgtgcgaagccatgttaaacacctatggagaagggttcgattatctgtatcagccttgtgatcttctcgctagtttactatgtgctagttacgaaccagaatcagtgaataaattcaagttcggcgcagctagtactcttaagagagctacgttcggagacaataaagcattgttaaacgcggctcttcataaaaagtcagaacctattaacgataatagtagctgccacttttttagcaaggtccctaatataggaactggatattacaaatactttatcgacttgggtcttctcatgagaatggaaaggaaactatctgataagatatcttctcaaaagatcaaggaaatggaagaaacagaagacttttaattcttatcaataacatatttttctatgatctgtcttttaaacgatggattttccacaaatgcgcctctcaagtccctcatagaatgatacacgtataaaaaatatagcataggcaatgactccttatttttagacattagatatgccaaaatcatagccccgcttctatttactcccgcagcacaatgaaccaacacgggctcgtttcgttgatcacatttagataaaaaggcggttacgtcgtcaaaatatttactaatatcggtagttgtatcatctaccaacggtatatgaataatattaatattagagttaggtaatgtatatttatccatcgtcaaatttaaaacatatttgaacttaacttcagatgatggtgcatccatagcatttttataatttcccaaatacacattattggttacccttgtcattatagtgggagatttggctctgtgcatatctccagttgaacgtagtagtaagtatttatacaaacttttcttatccatttataacgtacaaatggataaaactactttatcggtaaacgcgtgtaatttagaatacgttagagaaaaggctatagtaggcgtacaagcagccaaaacatcaacacttatattctttgttattatattggcaattagtgcgctattactctggtttcagacgtctgataatccagtctttaatgaattaacgagatatatgcgaattaaaaatacggttaacgattggaaatcattaacggatagcaaaacaaaattagaaagtgatagaggtagacttctagccgctggtaaggatgatatattcgaattcaaatgtgtggatttcggcgcctattttatagctatgcgattggataagaaaacatatctgccgcaagctattaggcgaggtactggagacgcgtggatggttaaaaaggcggcaaaggtcgatccatctgctcaacaattttgtcagtatttgataaaacacaagtctaataatgttattacttgtggtaatgagatgttaaatgaattaggttatagcggttattttatgtcaccgcattggtgttccgattttagtaatatggaatagtgttagataaatgcggtaacgaatgttcctgtaaggaaccataacagtttagatttaacgttaaagatgagcataaacataataaacaaaattacaatcaaacctataacattaatatcaaacaatccaaaaaatgaaatcagtggagtagtaaacgcgtacataactcctggataacgtttagtagctgccgttcctattctagaccaaaaattcggtttcatgttttcgaaacggtgttctgcaacaagtcggggatcgtgttctacatatttggcggcattatccagtatctgcctattgatcttcatttcgttttcaattctggctatttcaaaataaaatcccgatgatagacctccagactttataatttcatctacgatgttcagcgccgtagtaactctaataatataggctgataagctaacatcataccctcctgtatatgtgaatatggcatgatttttgtccattacaagctcggttttaactttattgcctgtaataatttctctcatctgtaggatatctatttttttgtcatgcattgccttcaagacgggacgaagaaacgtaatatcctcaataacgttatcgttttctacaataactacatattctacctttttattttctaactcggtaaaaaaattagaatcccatagggctaaatgtctagcgatatttcttttcgtttcctctgtacacatagtgttacaaaaccctgaaaagaagtgagtatacttgtcatcatttctaatgtttcctccagtccactgtataaacgcataatccttgtaatgatctggatcatccttgactaccacaacatttcttttttctggcataacttcgttgtcctttacatcatcgaacttctgatcattaatatgctcatgaacattaggaaatgtttctgatggaagtctatcaataactggcacaacaataacaggagttttcgccgccgccatttagttattgaaattaatcatatacaactctttaatacgagttatattttcgtctatccattgtttcacatttacatatttcgacaaaaagatataaaatgcgtattccaatgcttctctgtttaatgaattactaaaatatacaaacacgtcactgtctggcaataaatgatatcttagaatattgtaacaatttattttgtattgcacatgttcgtgatctatgagttcttcttcgaatggcataggatctccgaatctgaaaacgtataaataggagttagaataataatatttgagagtattggtaatatataaactctttagcggtataattagtttttttctctcaatttctatttttagatgtgatggaaaaatgactaattttgtagcattagtatcatgaactctaatcaaaatcttaatatcttcgtcacacgttagctctttgaagtttttaagagatgcatcagttggttcgaccgatggagtaggtgcaacaattttttgttcgatgtatgtatgtactggagccattgttttaactataatggtgcttgtatcgaaaaactttaatgcagatagcggaagctcttcgccgcgactttctacatcgtaattgggttctaacgccgatctctgaatggatactagttttctaagttctaatgtgattctctgaaaatgtaaatccaattcctccggcattatagatgtgtatacatcggtaaataaaactatagtatccaacgatcccttctcgcaaattctagtcttaaccaaaaaatcgtatataaccacggagatggcgtatttaagagtggattcttctaccgttttgttcttggatgtcatataggaaactataaagtccgcactactgttaagaatgattactaacgcaactatatagttcaaattaagcattttggaaacataaaataactctgtagacgatacttgactttcgaataagtttgcagacaaacgaagaaagaacagacctctcttaatttcagaagaaaactttttttcgtattcctgacgtctagagtttatatcaataagaaagttaagaattagtcggttaatgttgtatttcattacccaagtttgagatttcataatattatcaaaagacatgataatattaaagataaagcgctgactatgaacgaaatagctatatggttcgctcaaaaatatagtcttgttaaacgtggaaacgataactgtatttttaatcacgtcagcggcatctaaattaaatataggtatatttattccacacactctacaatatgccacaccatcttcataataaataaattcgttagcaaaattattaattttagtgaaatagttagcgtcaactttcatagcttccttcaatctaatttgatgctcacacggtgcgaattccactctaacatcccttttccatgcctcaggttcatcgatctctataatatctagttttttgcgtttcacaaacacaggctcgtctctcgcgatgagatctgtatagtaactatgtaaatgataactagatagaaagatgtagctatatagatgacgatcctttaagagaggtataataactttaccccaatcagatagactgttgttatggtcttcggaaaaagaatttttataaatttttccagtattttccaaatatacgtacttaacatctaaaaaatccttaatgataataggaatggataatccgtctattttataaagaaatacatatcgcacattatacttttttttggaaatgggaataccgatgtgtctacataaatatgcaaagtctaaatattttttagagaatcttaattggtccaaattcttttccaagtacggtaatagatttttcatattgaacggtatcttcttaatctctggttctagttccgcattaaatgatgaaactaagtcactatttttataactaacgattacatcacctctaacatcatcatttaccagaatactgatcttcttttgtcgtaaatacatgtctaatgtgttaaaaaaaagatcatacaagttatacgtcatttcatctgtggtattcttgtcattgaaggataaactcgtactaatctcttctttaacagcctgttcaaatttatatcctatatacgaaaaaatagcaaccagtgtttgatcatccgcgtcaatattctgttctatcgtagtgtataacaatcgtatatcttcttctgtgatagtcgatacgttataaaggttgataacgaaaatatttttatttcgtgaaataaagtcatcgtaggattttggacttatattcgcgtctagtagatatgcttttatttttggaatgatctcaattagaatagtctctttagagtccatttaaagttacaaacaactaggaaattggtttatgatgtataatttttttagtttttatagattctttattctatacttaaaaaatgaaaataaatacaaaggttcttgagggttgtgttaaattgaaagcgagaaataatcataaattatttcattatcgcgatatccgttaagtttgtatcgtaatggcgtggtcaattacaaataaagcggatactagtagcttcacaaagatggctgaaatcagagctcatctaaaaaatagcgctgaaaataaagataaaaacgaggatattttcccggaagatgtaataattccatctactaagcccaaaaccaaacgagccactactcctcgtaaaccagcggctactaaaagatcaaccaaaaaggaggaagtggaagaagaagtagttatagaggaatatcatcaaacaactgaaaaaaattctccatctcctggagtcagcgacattgtagaaagcgtggccgctgtagagctcgatgatagcgacggggatgatgaacctatggtacaagttgaagctggtaaagtaaatcatagtgctagaagcgatctctctgacctaaaggtggctaccgacaatatcgttaaagatcttaagaaaattattactagaatctctgcagtatcgacggttctagaggatgttcaagcagctggtatctctagacaatttacttctatgactaaagctattacaacactatctgatctagtcaccgagggaaaatctaaagttgttcgtaaaaaagttaaaacttgtaagaagtaaatgcgtgcacttttttataaagatggtaaactctttaccgataataattttttaaatcctgtatcagacgataatccagcgtatgaggttttgcaacatgttaaaattcctactcatttaacagatgtagtagtatatgaacaaacgtgggaggaggcgttaactagattaatttttgtgggaagtgattcaaaaggacgtagacaatacttttacggaaaaatgcatgtacagaatcgcaacgctaaaagagatcgtatttttgttagagtatataacgttatgaaacgaattaattgttttataaacaaaaatataaagaaatcgtccacagattccaattatcagttggcggtttttatgttaatggaaactatgttttttattagatttggtaaaatgaaatatcttaaggagaatgaaacagtagggttattaacactaaaaaataaacacatagaaataagtcccgatgaaatagttatcaagtttgtaggaaaggacaaagtttcacatgaatttgttgttcataagtctaatagactatataagccgctattgaaactgacggatgattctagtcccgaagaatttctgttcaacaaactaagtgaacgaaaggtatatgaatgtatcaaacagtttggtattagaatcaaggatctccgaacgtatggagtcaattatacgtttttatataatttttggacaaatgtaaagtccatatctcctcttccatcaccaaaaaagttaatagcgttaactatcaaacaaactgctgaagtggtaggtcatactccatcaatttcaaaaagagcttatatggcaacgactattttagaaatggtaaaggataaaaattttttagatgtagtatctaaaactacgttcgatgaattcctatctatagtcgtagatcacgttaaatcatctacggatggatgatatagatctttacacaaataattacaaaaccgataaatggaaatggataagcgtatgaaatctctcgcaatgaccgctttctttggggagctaagcacattagatattatggcattgataatgtctatatttaaacgccatccaaacaataccattttttcagtggataaggatggtcagtttatgattgatttcgaatacgataattataaggcttctcaatatttggatctgaccctcactccgatatctggagatgaatgcaagactcacgcatcgagtatagccgaacaattggcgtgtgtggatattattaaagaggatattagcgaatatatcaaaactactccccgtcttaaacgatttataaaaaaataccgcaatagatcagatactcgcatcagtcgagatacagaaaagcttaaaatagctctagctaaaggcatagattacgaatatataaaagacgcttgttaataagtaaatgaaaaaaaactagtcgtttataataaaacacgatatggatgccaacgtagtatcatcttctactattgcgacgtatatagacgctttagcgaagaatgcttcggaattagaacagaggtctaccgcatacgaaataaataatgaattggaactagtatttattaagccgccattgattactttgacaaatgtagtgaatatctctacgattcaggaatcgtttattcgatttaccgttactaataaggaaggtgttaaaattagaactaagattccattatctaaggtacatggtctagatgtaaaaaatgtacagttagtagatgctatagataacatagtttgggaaaagaaatcattagtgacggaaaatcgtcttcacaaagaatgcttgttgagactatcgacagaggaacgtcatatatttttggattacaagaaatatggatcctctatccgactagaattagtcaatcttattcaagcaaaaacaaaaaactttacgatagactttaagctaaaatattttctaggatccggtgcccagtctaaaagttctttattacacgctattaatcatccaaagtcaaggcctaatacatctctggaaatagaatttacacctagagacaatgaaacagttccatatgatgaactaataaaggaattgacgactctctcgcgtcatatatttatggcttctccagagaatgtaattctttctccgcctattaacgcgcctataaaaacctttatgttgcctaaacaagatatagtaggtttggatctggaaaatctatatgccgtaactaagactgacggcattcctataactatcagagttacatcaaacgggttgtattgttattttacacatcttggttatattattagatatcctgttaagagaataatagattccgaagtagtagtctttggtgaggcagttaaggataagaactggaccgtatatctcattaagctaatagagcctgtgaatgcaatcaatgatagactagaagaaagtaagtatgttgaatctaaactagtggatatttgtgatcggatagtattcaagtcaaagaaatacgaaggtccgtttactacaactagtgaagtcgtcgatatgttatctacatatttaccaaagcaaccagaaggtgttattctgttctattcaaagggacctaaatctaacattgattttaaaattaaaaaggaaaatactatagaccaaactgcaaatgtagtatttaggtacatgtccagtgaaccaattatctttggagagtcgtctatctttgtagagtataagaaatttagcaacgataaaggctttcctaaagaatatggttctggtaagattgtgttatataacggcgttaattatctaaataatatctattgtttggaatatattaatacacataatgaagtgggtattaagtccgtggttgtacctattaagtttatagcagaattcttagttaatggagaaatacttaaacctagaattgataaaaccatgaaatatattaactcagaagattattatggaaatcaacataatatcatagtcgaacatttaagagatcaaagcatcaaaataggagatatctttaacgaggataaactatcggatgtgggacatcaatacgccaataatgataaatttagattaaatccagaagttagttattttacgaataaacgaactagaggaccgttgggaattttatcaaactacgtcaagactcttcttatttctatgtattgttccaaaacatttttagacgattccaacaaacgaaaggtattggcgattgattttggaaacggtgctgacctggaaaaatacttttatggagagattgcgttattggtagcgacggatccggatgctgatgctatagctagaggaaatgaaagatacaacaaattaaactctggaattaaaaccaagtactacaaatttgactacattcaggaaactattcgatccgatacatttgtctctagtgtcagagaagtattctattttggaaagtttaatatcatcgactggcagtttgctatccattattcttttcatccgagacattatgctaccgtcatgaataacttatccgaactaactgcttctggaggcaaggtattaatcactaccatggacggagacaaattatcaaaattaacagataaaaagacttttataattcataagaatttacctagtagcgaaaactatatgtctgtagaaaaaatagctgatgatagaatagtggtatataatccatcaacaatgtctactccaatgactgaatacattatcaaaaagaacgatatagtcagagtgtttaacgaatacggatttgttcttgtagataacgttgatttcgctacaattatagaacgaagtaaaaagtttattaatggcgcatctacaatggaagatagaccatctacaagaaactttttcgaactaaatagaggagccattaaatgtgaaggtttagatgtcgaagacttacttagttactatgttgtttatgtcttttctaagcggtaaataataatatggtatgggttctgatctcccagttctaaatgcattaaataattccaatagagcgatttttgttcctataggaccttccaactgtggatactctgtattgttaatagatatattaatacttttgtcgggtaacagaggttctacgtcttttaaaaataaaagtttgataacatctggcctgttcataaataaaaacttggcgattctatatatactcttattatcaaatctagccattgtcttatagatgtgagctactgtaggtgtaccatttgattttctttctaatactatatatttctctcgaagaagttcttgcacatcatctgggaataaaatactactgttgagtaaatcagttattttttttatatcgatattgatggacatttttatagttaaggataataagtatcccaaagtagataacgacgataacgaagtatttatacttttaggaaatcacaatgactttatcagattaaaattaacaaaattaaaggagcatgtatttttttctgaatatattgtgactccagatacatatggatctttatgcgtcgaattaaatgggtctagttttcagcacggcggtagatatatagaggtggaggaatttatagatgctggaagacaagttagatggtgttctacatccaatcatatatctaaagatatacccgaagatatgcacactgataaatttgtcatttatgatatatacacttttgacgctttcaagaataaacgattggtattcgtacaggtacctccgtcgttaggagatgatagtcatttgactaatccgttattgtctccgtattatcgtaattcagtagccagacaaatggtcaatgatatgatttttaatcaagattcatttttaaaatatttattagaacatctgattagaagccactatagagtttctaaacatataacaatagttagatacaaggataccgaagaattaaatctaacgagaatatgttataatagagataagtttaaggcgtttgtattcgcttggtttaacggcgtttcggaaaatgaaaaggtactagatacgtataaaaaggtatctaatttgatataatgaattcagtgactgtatcacacgcgccatatactattacttatcacgatgattgggaaccagtaatgagtcaattggtagagttttataacgaagtagccagttggctgctacgagacgagacgtcgcctattcctgataagttctttatacagttgaaacaaccgcttagaaataaacgagtatgtgtgtgcggtatagatccgtatccgaaagatggaactggtgtaccgttcgaatcaccaaattttacaaaaaaatcaattaaggagatagcttcatctatatctagattaaccggagtaattgattataaaggttataaccttaatataatagacggggttataccctggaattattacttaagttgtaaattaggagaaacaaaaagtcacgcgatctactgggataagatttccaagttactgctgcagcatataactaaacacgttagtgttctttattgtttgggtaaaacagatttctcgaatatacgggccaagttagaatccccggtaactaccatagtcggatatcatccagcggctagagaccgccaattcgagaaagatagatcatttgaaattatcaacgttttactggaattagacaacaaggcacctataaattgggctcaagggtttatttattaatgctttagtgaaattttaacttgtgttctaaatggatgcggctattagaggtaatgatgttatctttgttcttaagactataggtgtcccgtcagcgtgcagacaaaatgaagatccaagatttgtagaagcatttaaatgcgacgagttagaaagatatattgagaataatccagaatgtacactattcgaaagtcttagggatgaggaagcatactctatagtcagaattttcatggatgtagatttagacgcgtgtctagacgaaatagattatttaacggctattcaagattttattatcgaggtgtcaaactgtgtagctagattcgcgtttacagaatgcggcgccattcatgaaaatgtaataaaatccatgagatctaatttttcattgactaagtctacaaatagagataaaacaagttttcatattatctttttagacacgtataccactatggatacattgatagctatgaaacgaacactattagaattaagtagatcatctgaaaatccactaacaagatcgatagacactgccgtatataggagaaaaacaactcttcgggttgtaggtactaggaaaaatccaaattgcgacactattcatgtaatgcaaccaccgcatgataatatagaagattacctattcacttacgtggatatgaacaacaatagttattacttttctctacaacaacgattggaggatttagttcctgataagttatgggaaccagggtttatttcattcgaagacgctataaaaagagtttcaaaaatattcattaattctataataaactttaatgatctcgatgaaaataattttacaacggtaccactggtcatagattacgtaacaccttgtgcattatgtaaaaaacgatcgcataaacatccgcatcaactatcgttggaaaatggtgctattagaatttacaaaactggtaatccacatagttgtaaagttaaaattgttccgttggatggtaataaactgtttaatattgcacaaagaattttagacactaactctgttttattaaccgaacgaggagaccatatagtttggattaataattcatggaaatttaacagcgaagaacccttgataacaaaactaattttgtcaataagacatcaactacctaaggaatattcaagcgaattactctgtccaagaaaacgaaagactgtagaagctaacatacgagacatgttagtagattcagtagagaccgatacctatccggataaacttccgtttaaaaatggtgtattggacctggtagacggaatgttttactctggagatgatgctaaaaaatatacgtgtactgtatcaaccggatttaaatttgacgatacaaagttcgtcgaagacagtccagaaatggaagagttaatgaatatcattaacgatatccaaccattaacggatgaaaataagaaaaatagagagctatatgaaaaaacattatctagttgtttatgcggtgctaccaaaggatgtttaacattcttttttggagaaactgcaactggaaagtcgacaaccaaacgtttgttaaagtctgctatcggtgacctgtttgttgagacgggtcaaacaattttaacagatgtattggataaaggacctaatccatttatcgctaacatgcatttgaaaagatctgtattctgtagcgaactacctgattttgcctgtagtggatcaaagaaaattagatctgacaatattaaaaagttgacagaaccttgtgtcattggaagaccgtgtttctccaataaaattaataatagaaaccatgcgacaatcattatcgatactaattacaaacctgtttttgataggatagataacgcattaatgagaagaattgccgtcgtgcgattcagaacacacttttctcaaccttctggtagagaggctgctgaaaataatgacgcgtacgataaagtcaaactattagacgaggggttagatggtaaaatacaaaataatagatatagattcgcatttctatacttgttggtgaaatggtacagaaaatatcatgttcctattatgaaactatatcctacacccgaagagattcctgactttgcattctatctcaaaataggtactctgttagtatctagctctgtaaagcatattccattaatgacggacctctccaaaaagggatatatattgtacgataatgtggtcactcttccgttgactactttccaacagaaaatatccaagtattttaattctagactatttggacacgatatagagagcttcatcaatagacataagaaatttgccaatgttagtgatgaatatctgcaatatatattcatagaggatatttcatctccgtaaatatatgctcatatatttatagaagatatcacatatctaaatgaataccggaatcatagatttatttgataatcatgttgatagtataccaactatattacctcatcagttagctactctagattatctagttagaactatcatagatgagaacagaagcgtgttattgttccatattatgggatcaggtaaaacaataatcgctttgttgttcgccttggtagcttccagatttaaaaaggtttacattctagtgcctaatatcaacattttgaaaatttttaattataatatgggtgtagctatgaacttgtttaatgacgaattcatagctgagaatatctttattcattccacaacaagtttttattctcttaattataacgataacgtcattaattataacggattatctcgctacaataactctatttttatcgttgatgaggcacataatatctttgggaataatactggagaacttatgaccgtgataaaaaataaaaacaagattccttttctactattgtctggatctcccattactaacacacctaatactctgggtcatattatagatttaatgtccgaagagacgatagattttggtgagattattagtcgtggtaagaaagtaattcagacacttcttaacgaacgcggtgtgaatgtacttaaggatttgcttaaaggaagaatatcatattacgaaatgcctgataaagatctaccaacgataagatatcacggacgtaagtttctagatactagagtagtatattgtcacatgtctaaacttcaagagagagattatatgattactagacgacagctatgttatcatgaaatgtttgataaaaatatgtataacgtgtcaatggcagtattgggacaacttaatctgatgaataatttagatactttatttcaggaacaggataaggaattgtacccaaatctgaaaataaataatggcgtgttatacggagaagaattggtaacgttaaacattagttccaaatttaaatactttattaatcggatacagacactcaacggaaaacattttatatacttttctaattctacatatggcggattggtaattaaatatatcatgctcagtaatggatattctgaatataatggttctcagggaactaatccacatatgataaacggcaaaccaaaaacatttgctatcgttactagtaaaatgaaatcgtctttagaggatctattagatgtgtataattctcctgaaaacgatgatggtagtcaattgatgtttttgttttcgtcaaacattatgtccgaatcctatactctgaaagaggtaaggcatatttggtttatgactatcccagatactttttctcaatacaaccaaattcttggacgatctattagaaaattctcttacgccgatatttctgaaccagttaatgtatatcttttagccgccgtatattccgatttcaatgacgaagtaacgtcattaaacgattacacacaggatgaattgattaatgttttaccatttgacatcaaaaagctgttatatctaaaatttaagactaaagaaacgaatagaatatactctattcttcaagagatgtctgaaacgtattctcttccaccacatccatcaattgtaaaagttttattgggagaattggtcagacaatttttttataataattctcgtattaagtataacgactccaagttacttaaaatggttacatcagttataaaaaataaagaagacgctaggaattacatagatgatattgtaaacggtcacttctttgtatcgaataaagtatttgataaatctcttttatacaaatacgaaaacgatattattacagtaccgtttagactttcctacgaaccatttgtttggggagttaactttcgtaaagaatataacgtggtatcttctccataaaactgatgaaatatataaagaaataaatgtcgagctttgttaccaatggataccttccagttacattggaaccacacgagctgacgttagacataaaaactaatattaggaatgccgtatataagacgtatctccatagagaaattagtggtaaaatggccaagaaaatagaaattcgtgaagacgtggaattacctctcggcgaaatagttaataattctgtagttataaacgttccgtgtgtaataacctacgcgtattatcacgttggggatatagtcagaggaacattaaacatcgaagatgaatcaaatgtaactattcaatgtggagatttaatctgtaaactaagtagagattcgggtactgtatcatttagcgattcaaagtactgcttttttcgaaatggtaatgcgtatgacaatggcagcgaagtcactgccgttctaatggaggctcaacaaggtatcgaatctagttttgtttttctcgcgaatatcgtcgactcataaaaaagagaatagcggtaagtataaacacgaatactatggcaataattgcgaatgttttattctcttcgatatatttttgataatatgaaaaacatgtctctctcaaatcggacaaccatctcataaaatagttctcgcgcgctggagaggtagttgctgctcgtataatctccccagaataatatacttgcgtgtcgtcgttcaatttatacggatttctatagttctctgttatataatgcggttttccatcatgattagacgacgacaatagtgttctgaatttagatagttgatcagaatgaatgtttattggcgttggaaaaattatccatacagcgtctgcagagtggttgatagttgttcctagatatgtaaaataatccaacttactaggcagcaaattgtctagataaaatactgaatcaaacggtgcagacgtattggcggatctaatggaatccaattgattaactatcttttgaaaatatacatttttatgatccaatacttgtaagaatatagaaataatgataagtccatcatcgtgtttttttgcctcttcataagaactatattttttcttattccaatgaacaagattaatctctccagagtatttgtacacatctatcaagtgattggatccataatcgtcttcctttccccaatatatatgtagtgatgataacacatattcattggggagaaaccctccacttatatatcctcctttaaaattaatccttactagttttccagtgttctggatagtggttggtttcgactcattataatgtatgtctaacggcttcaatcgcgcgttagaaattgcttttttagtttctatattaataggagatagttgttgcggcatagtaaaaatgaaatgataactgtttaaaaatagctcttagtatgggaattacaatggatgaggaagtgatatttgaaactcctagagaattaatatctattaaacgaataaaagatattccaagatcaaaagacacgcacgtgtttgctgcgtgtataacaagtgacggatatccgttaataggagctagaagaacttcattcgcgttccaggcgatattatctcaacaaaattcagattctatctttagagtatccactaaactattacggtttatgtactacaatgaactaagagaaatctttagacggttgagaaaaggttctatcaacaatatcgatcctcactttgaagagttaatattattgggtggtaaactagataaaaaggaatctattaaagattgtttaagaagagaattaaaagaggaaagtgatgaacgtataacagtaaaagaattcggaaatgtaattctaaaacttacaacgcgcgataaattatttaataaagtatatataggttattgcatggcgtgttttattaatcaatcgttggaggatttatcgcatactagtatttacaatgtagaaattagaaagattaaatcattaaatgattgtattaacgacgataaatacgaatatctgtcttatatttataatatgctagttaatagtaaatgaacttttacagatctagtataattagtcagattattaagtataatagacgactagctaagtctattatttgcgaggatgactctcaaattattacactcacggcattcgttaaccaatgcctatggtgtcataaacgagtatccgtgtccgctattttattaactactgataacaaaatattagtatgtaacagacgagatagttttctctattctgaaataattagaactagaaacatgtttagaaagaaacgattatttctgaattattccaattatttgaacaaacaggaaagaagtatactatcgtcatttttttctctagatccagctactgctgataatgatagaatagacgctatttatccgggtggcatacccaaaaggggtgagaatgttccagagtgtttatccagggaaattaaagaagaagttaatatagacaattcttttgtattcatagacactcggttttttattcatggcatcatagaagataccattattaataaattttttgaggtaatcttctttgtcggaagaatatctctaacgagtgatcaaatcattgatacatttaaaagtaatcatgaaatcaaggatctaatatttttagatccgaattcaggtaatggactccaatacgaaattgcaaaatatgctctagatactgcaaaactcaaatgttatggccatagaggatgttattacgaatcattaaaaaaattaactgaggatgattgattagaaaatataaattaatttaccatcgtgtatttttataacgggattgtccggcatatcatgtagatagttaccgtctacatcgtatactcgaccatctacgcctttaaatcctctatttattgacattaatctattagaattggaataccaaatattagtaccctcaattagtttattggtaatatttttgttagacgatagatcgatggctcttgaaaccaaggttttccaaccggactcattgtcgatcggtgagaagtctttttcattagcatgaatccattctaatgatgtatgtttaaacactctaaacaattggacaaattcttttgatttgctttgaatgatttcaaataggtcttcgtctacagtaggcataccattagataatctagccattataaagtgcacgtttacatatctacgttctggaggagtaagaacgtgactattgagacgaatggctcttcctactatctgacgaagagacgcctcgttccatgtcatatctaaaatgaagatatcattgattgagaagaagctaataccctcgcctccactagaagagaatacgcatgttttaatgcattctccgttagtgtttgattcttggttaaactcagccaccgccttgattctagtatcttttgttctagatgagaactctatattagagataccaaagactttgaaatatagtaataagatttctattcctgactgattaacaaatggttcaaagactagacatttaccatgggatgctaatattcccaaacatacatctataaatttgacgcttttctcttttaattcagtaaatagagagatatcagccgcactagcatcccctcccaatagttctccccttttaaaggtatctaatgcagatttagaaaattctctatctcttaatgaatttttaaaatcattatatagtgttgctatctcttgcgcgtattcgcccggatcacgattttgtctttcaggaaagctatcgaacgtaaacgtagtagccatacgtctcagaattctaaatgatgatatacctgtttttatttcagcgagtttagccttttgataaatttcttcttgctttttcgacatattaacgtatcgcattaatactgttttcttagcgaatgatgcagacccttctacgtcatcaaaaatagaaaactcgttattaactatgtacgaacataggcctcctagtttggagactaattctttttcatcaactagacgtttattctcaaatagcgattggtgttgtaaggatcctggtcgtagtaagttaaccaacatggtgaattcttgcacactattgacgataggtgtagccgataaacaaatcatcttatggttttttaatgcgatggtcttagataaaaaattatatactgaacgagtaggacggatcttaccatcttctttgattaatgatttagaaatgaagttatgacattcatcaataatgacgcatattctactcttggaattaatagttttgatattagtaaaaaatttatttctaaaattttgatcatcgtaattaataaaaatacaatccttcgttatctctggagcgtatctgagtatagtgttcatccaaggatcttctatcaaagcctttttcaccaataagataatagcccaattcgtataaatatccttaagatgtttgagaatatatacagtagtcattgttttaccgacacccgtttcatggaacaataaaagagaatgcatactgtctaatcctaagaaaactcttgctacaaaatgttgataatccttgaggcgtactacgtccgaccccatcatttcaacaggcatattagtagttctgcgcaatgcataatcgatataggccgcgtgtgatttactcatttatgagtgataagtaataactatgttttaaaaatcacagcagtagtttaactagtcttctctgatgtttgttttcgatactttttgaatcagaagtcatactagaataaagcaacgagtgaacgtaatagagagcttcgtatactctattcgaaaactctaagaacttattaatgaattccgtatccactggattgtttaaaatactaaattgaacactgttcacatccttccaagaagaagacttagtgacggacttaacatgagacataaataaatccaaattttttttacaaacatcactagccaccataatggcgctatcttttaaccagctatcgcttacgcattttagcagtctaacatttttaaagagactacaatatattctcatagtatcgattacacctctaccgaataaagttggaagtttaataatacaatatttttcgtttacaaaatcaaataatggtcgaaacacgtcgaaggttaacatcttataatcgctaatgtatagattgttttcagtgagatgattattagatttaatagcatctcgttcacgtttgaacagtttattgcgtgcgctgaggtcggcaactacggcgtccgctttagtactcctcccataatactttacgctattaatctttaaaatttcatagactttatctagatcgctttctggtaacatgatatcatgtgtaaaaagttttaacatgtcggtcggcattctatttagatcattaactctagaaatctgaagaaagtaattagctccgtattccagactaggtaatgggcttttacctagagacagattaagttctggcaatgtttcataaaatggaagaaggacatgcgttccctcccggatattttttacaatttcatccatttacaactctatagtttgttttcattattattagttattatctcccataatcttggtaatacttaccccttgatcgtaagataccttatacaggtcattacatacaactaccaattgtttttgtacataatagattggatggttgacatccatggtggaataaactactcgaacagatagtttatctttccccctagatacattagccgtaatagttgtcggcctaaagaatatctttggtgtaaagttaaaagttagggttcttgttccattattgctttttgtcagtagttcattataaattctcgagatgggtccgttctctgaatatagaacatcatttccaaatctaacttctagtctagaaataatatcggtcttattcttaaaatctattcccttgatgaagggatcgttaatgaacaaatccttggcctttgattcggctgatctattatctccgttatagacgttacgttgactagtccaaagacttacaggaatagatgtatcgatgatgttgatactatgtgatatgtgagcaaagattgttctcttagtggcatcactatatgttccagtaatggcggaaaactttttagaaatgttatatataaaagaattttttcgtgttccaaacattagcagattagtatgaagataaacactcatattatcaggaacattatcaatttttacatacacatcagcatcttgaatagaaacgataccatcttctggaacctctacgatctcggcagactccggataaccagtcggtggaccatcgctaacaataactagatcatccaacaatctactcacatatgcatctatataatctttttcatcttgtgagtaccctggatacgaaataaatttattatccgtatttccataataaggtttagtataaacagagagcgatgttgccgcatgaacttcagttacagtcgccgttggttggtttatttgacctattactctcctaggtttctctataaatgatggtttaatttgtacattcttaaccatatatccaataaagctcaattcaggaacataaacaaattctttgttgaacgtttcaaagtcgaacgaagagtcacgaataacgatatcggatactggattgaaggttaccgttacggtaatttttgaatcggatagtttaagactgctgaatgtatcttccacatcaaacggagttttaatataaacgtatactgtagatggttctttaatagtgtcattaggagttaggccaatagaaatatcattaagttcactagaatatccagagtgtttcaaagcaattgtattattgatacaattattatataattcttcgccctcaatttcccaaataacaccgttacacgaagagatagatacgtgattaatacatttatatccaacatatggtacgtaaccgaatcttcccatacctttaacttctggaagttccaaactcagaaccaaatgattaagcgcagtaatatactgatccctaatttcgaagctagcgatagcctgattgtctggaccatcgtttgtcataactccggatagagaaatatattgcggcatatataaagttggaatttgactatcgactgcgaagacattagaccgtttaatagagtcatccccaccgatcaaagaattaatgatagtattattcattttctatttaaaatggaaaaagcttacaataaactccgtagagaaatatctataatttgtgagttttccttaaagtaacagcttccgtaaacgccgtctttatctcttagtaagtttattgtatttataaccttttccttatcttcatagaatactaaaggcaacaaagaaatttttggttcttctctaagagctacgtgagacttaaccatagacgccaacgaatccctacatattttagaacagaaatacccaacttcaccacccttgaatgtctcaatactaataggtttaaaaaccaaatcttgattacaaaaccaacacttatcaattacactatttgtcttaatagacacatctgccatagatttataatactttggtagtatacaagcgagtgcttcttctttagcgggcttaaagactgctttaggtgctgaaataaccacatctggaaggcttactcgcttagccatttaattacggaactatttttttatacttctaatgagcaagtagaaaacctctcatctacaaaaacatactcgtgtccataatcctctaccatagttacacgttttttagatctcatatgtgctaaaaagttttcccatactaattggttactattatttttcgtataatttttaacagtttgaggttttagatttttagttacagaagtgatatcgaatattttatccaaaaagaatgaataattaattgtcttagaaggagtgttttcttggcaaaagaataccaagtgcttaaatatttctactacttcattaatcttttctgtactcagattcagtttctcatcttttacttgattgattatttcaaagactaacttataatcctttttatttattctctcgttagccttaagaaaactagatacaaaatttgcatctacatcatccgtggatatttgatttttttccatgatatccaagagttccgagataatttctccagaacattgatgagacaataatctccgcaatacatttctcaaatgaataagtttattagacacatggaagtttgactttttttgtacctttgtacatttttgaaataccgactcgcaaaaaatacaatattcatatccttgttcagatactataccgttgtgtctacaaccgctacataatcgtagattcatgttaacactctacgtatctcgtcgtccaatattttatataaaaacattttatttctagacgttgccagaaaatcctgtaatatttttagttttttgggctgtgaataaagtatcgccctaatattgttaccgtcttccgccaatatagtagttaaattatccgcacatgcaaaagaacaccgcttaggcggattcagtacaatgttatatttttcgtaccaactcatttaaatatcataatctaaaatagttctgtaatatgtctagcgctaatatattgatcataatcctgtgcataaattaagatacaacaatgtctcgaaatcatcgacatggcttcttccatagttagaagatcgtcgtcaaagttagcaacgtgattcatcaacatttgctgttttgaggcagcaaatactgaaccgtcgccattcaaccattcataaaaaccatcgtctgaatccattgataatttcttgtactggtttttgagagctcgcatcaatctagcatttctagctcccggattgaaaacagaaagaggatcgtacatccagggtccattttctgtaaatagaatcgtataatgtcccttcaagaagatatcagacgatccacaatcaaagaattggtctccgagtttgtaacaaactgcggactttaacctatacatgataccgtttagcatgatttctggtgatacgtcaatcggagtatcatctattagagatctaaagccggtgtaacattctccaccaaacatattcttattctgacgtcgttctacataaaacatcattgctccattaacgataacaggggaatgaacagcactacccatcacattagttcccaatggatcaatgtgtgtaactccagaacatcttccatatcctatgttaggaggagcgaacaccactcttccactattgccatcgaatgccatagaataaatatccttggaattgatagaaatcggactgtcggatgttgtgatcatcttcataggattaacaactatgtatggtgccgcctgaagtttcatatcgtaactgatgccgtttataggtctagccacagaaaccaacgtaggtctaaatccaactatagacaaaatagaagccaatatctgttcctcatctgtcataacttgagagcatccagtatgaataatcttcattagatggggatctaccgcatcatcatcgttacaataaaaaattcccattctaatgttcataattgcttttctaatcatggtatgcatgtttgctctctgaatctctgtggaaattagatctgatacacctgtaatcactatcggattatcctccgtaagacgattaaccaacaacatataattataagactttacttttctaaattcataaagttgctggattaggctataggtgtctccatgtacatacgcgttctcgagcgcaggaagtttaataccgaatagtgccatcagaataggatgaatatagtaattagtttctggttttctataaataaaagacaaatcttgtgaactagacatatcggtaaaatgcatggattggaatcgtgtagtcgacagaagaatatgatgattagatggagagtatattttatctaactctttgagttggtcaccgattctaggactagctcgagaatgaataagtactaaaggatgagtacatttcacagaaacactagcattgttcaatgtgctctttacatgggtaaggagttgaaatagctcgtttctatttgttctgacaatatttagtttattcataatgttaagcatatcctgaatagtaaagttagatgtgtcatacttgttagtagttagatatttagcaattgcattcccatcatttctcaatctcgtactccaatcatgtgtagatgctacttcgtcgatggaaaccatacaatcctttttgataggctgttgagattgattatttcctgcacgtttaggtttggtacgttgatttctagcccctgcggatataaagtcatcgtctacaatttgggacaatgaattgcatacactacaagacaaagatttatcagaagtgtgaatatgatcttcatctaccaaagaaagagtttgattagtataactagattttagtcctgcgttagatgttaaaaaaacatcgctattgaccacggcttccattatttatattcgtagtttttactcgaaagcgtgattttaatatccaatcttattacttttggaatcgttcaaaacctttgactagttgtagaatttgatctattgccctacgcgtatactcccttgcatcatatacgttcgtcaccagatcgtttgtttcggcctgaagttggtgcatatctctttcaacattcgacatgagatccttaagggccatatcgtctagattttgttgagatgctgctcctggatttggattttgttgtgctgttgtacatactgtaccaccagtaggtgtaggagtacatacagtggccacaataggaggttgaggaggtgtaaccgttggagtagtacaagaaatatttccatccgattgttgtgtacatgtagttgttggtaacgtctgagaaggttgggtagatggcggtgtcgtcgtcttttgatctttattaaatttagagataatatcctgaacagcattgctcggcgtcaacgctggaaggagtgaactcgccggcgcatcagtatcttcagacagccaatcaaaaagattagacatatcagatgatgtattagtttgttgtcgtggttttggtgtaggaacagtactactaggtagaagaataggagccggtgtagctgttggaaccggctgtggagttatatgaatagttggttgtagcggttggataggctgtctgctggcgaccgtcatattatctctagctagttgttctcgcaactgtctttgataatacgactcttgagactttagtcctatttcaatcgcttcatcctttttcgtatccggatccttttcttcagaataatagattgacgactttggtgtagaggattctgccagcccctgtgagaacttgttaaagaagtccatttaaggctttaaaattgaattgcgattataagattaaatggcagacacagacgatattatcgactatgaatccgatgatctcaccgaatacgaggatgatgaagaagaggaagaagatggagagtcactagaaactagtgatatagatcccaaatcttcttataagattgtagaatcagcatccactcatatagaagatgcgcattccaatcttaaacatatagggaatcatatatctgctcttaaacgacgctatactagacgtataagtctatttgaaatagcgggtataatagcagaaagctataacttgcttcaacgaggaagattacctctagtttcagaattttctgacgaaacgatgaagcaaaatatgctacatgtaattatacaagagatagaggagggttcttgtcctatagtcatcgaaaagaacggagaattgttgtcggtaaacgattttgacaaagatggtctaaaattccatctagactatattatcaaaatttggaaacttcaaaaacgatattagaatttatacgaatatcgttctctaaatgtcacaatcaagtctcgcatgttcagcaatttattgtcgtactttatatcgtgttcattaacgatatcttgcaaaatagtaatgattctatcttccttcgatagatattcttcagagattattgtcttatattttttcttgttatccgatatgaatttgataagactttgaacattattgatacccgtctgtttaattttttctacagatattttagttttggcagattctatcgtatctgtcaatagacatccaacatcgacattcgacgtcaattgtctataaatcaacgtataaattttagaaataacattagcgaattgttgtgcattgatgtcgttattctgaaacagtatgattttaggtagcattttcttaacaaagagaacgtatttattgttactcagttgaacagatgatatatccagattactaacgcatctgattccgtataccaaactttcagaagaaatggtgtacaattgtttgtattcattcaatgtctctttttcagaaattagtttagagtcgaatactgcaataattttcaagagatagttttcatcagataagattttatttagtgtagatatgataaaactattgttttgttggagaacttgatacgccgcgttctctgtagtcgacgctctcaaatgggaaacaatctccattatttttttggaatcggatactatatcttcggtatcttgacgcagtctagtatacatagagttaagagagattagagtttgtacattaagcaacatgtctctaaatgtggctacaaacttttcctttttcacataatctagtttattatataccgatttcacaacggcaccagatttaaggaaccagaatgaaaaactctgataactacaatatttcatcatagttacgattttatcatcttctatagttggtgtaatagcgcatacctttttctccaagactggaaccaacgtcataaaaatgtttaaatcaaaatccatatcaacatctgatgcgctaagaccagtctcgcgttcaagattatctttactaatggtgacgaactcatcatatagaactctaagtttgtccattatttatttacagatttagttgtttaatttatttgtgctcttccagagttgggatagtatttttctaacgtcggtattatattattaggatctacgttcatatgtatcataatattaatcatccacgttttgataaatctatctttagcttctgaaataacgtatttaaacaaaggagaaaaatatttagctacggcatcagacgcaataacattttttgtaaatgtaacgtatttagacgacagatcttcgttaaaaagttttccatctatgtagaatccatcggttgttaacaccattcccgcgtcagattgaataggagtttgaatagtttgttttggaaatagatccttcaataacttatagttgggtgggaaaaaatcgattttatcactagactctttcttttttactatcattacctcatgaactatttcttgaatgagtatatgtattttctttcctatatcggacgcgttcattggaaaatataccatgtcgttaactataagaatatttttatcctcgtttacaaactgaataatatcagatgtagttcgtaaacgaactatatcatcaccagcacaacatctaactatatgatatccactagtttcctttagccgtttattatcttgttccatattagcagtcattccatcatttaagaaggcgtcaaagataatagggagaaatgacattttggattctgttacgactttaccaaaattaaggatatacggacttactatctttttctcaacgtcgatttgatgaacacacgatgaaaatgtgcttctatgagattgatcatgtagaaaacaacaagggatacaatatttccgcatatcatgaaatatattaagaaatcccaccttattatatttccccaaaggatccatgcatgtaaacattatgccgttatcattaataaagacttctttctcatcggatttgtaaaagttgttactgatttttttcattccaggatctagataattaataatgatgggttttctattcttattctttgtattttggcatatcctagaccagtaaacagtttccactttggtaaaatcagcagacttttgaacgctattaaacatggcattaatggcaataactaaaaatgtaaaatatttttctatgttaggaatatggtttttcactttaatagatatatggtttttggccaaaatgatagatatttttttatccgaggatagtaaaatattattagtcgccgtctctataaaaatgaagctagtctcgatatccaattttattctagaattgataggagtcgccaaatgtaccttatacgttatatctcccttgatgcgttccatttgtgtatctatatcggacacaagatctgtaaatagttttacgttattaatcatcacggtatcgccgtcgctagataacgctaatgtaccatccaagtcccaaatggagagatttaactgttcatcgtttagaataaaatgattaccggtcatattaataaagtgttcatcgtatctagataacaacgacttataattaatgtccaagtcttgaactcgctgaatgatcttttttaacccagttagttttagattggtacgaaatatattgttaaactttgattctacagtaatgtccaaatctagttgtggaaatacttccatcaacattgtttcaaacttgataatattattatctacatcttcatacgatccaaattccggaatagatgtatcacatgctcttgccacccagataaccaaaaagtcacacgctccaggatatacattgtataaaaagctatcgttttttagtagtgtttttttctgagtatatacgaagggattaaaaatagtattatcaacgtaactatattccaaattattcttatgagaatagataataatatcgtccttaatatctaacaaatttcctaaatatccctttaattgagtcattcgaagcgtcaatagaatatgtctcttaactatttccggctgttgtatatttaaatgacttcgtaaaaaataatatatgggcgacttctcatctatgtaatcatatggagtgagatatagggctcgttctacctcctgccccttacccacctgtaataccaattgcggacttactatatatcgcatatttatatcgtggggtaaagtgaaaatctactaccgatgatgtaagtcttacaatgttcgaaccagtaccagatcttaatttggaggcctccgtagaactaggggaggtaaatatagatcaaacaacacctatgataaaggaaaatagcggttttatatcccgtagtagacgtctattcgcccatagatctaaggatgatgagagaaaactagcactacgattctttttacaaagactttattttttagatcatagagagattcattatttgttcagatgcgttgacgctgtaaaagacgtcactattaccaaaaaaaataacattatcgtggcgccttatatagcacttttaactatcgcatcaaaaggatgcaaacttacagaaacaatgattgaagcattttttccagaactatataatgaacatagtaagaaatttaaattcaactctcaagtatccatcatccaagaaaaactcggataccagtttggaaactatcacgtttatgattttgaaccgtattactctacagtagctctggctattcgagatgaacattcatctggcatttttaatatccgtcaagagagttatctggtaagttcattatctgaaataacatatagattttatctaattaatctaaaatctgatcttgttcaatggagtgctagtacgggcgctgtaattaatcaaatggtaaatactgtattgattacagtgtatgaaaagttacaactggtcatagaaaatgattcacaatttacatgttcattggctgtggaatcaaaacttccaataaaattacttaaagatagaaatgaattatttacaaaattcattaacgagttaaaaaagaccagttcattcaagataagcaaacgcgataaggatacgctactaaaatattttacttaggactggagttagaatttatagacgactcatttcgtttatcattgttactattattactattactatcattattagtgttggcattattagtattcttcttgtcatcttgttcagaaatatacagcaatgctatacctaatactaaatacattatcatgctcgcaatggctctaacaacaacgaaccaaaatgaatttggtcgtagcttttgttcacaaaaatacataaagaaatgtctacataaatctatggcgccattggctacttgaaatagcgccagtcctcctacagattttaatatagctgtataacatgacatttattcatcatcaaaagagacagagtcaccatctgtcatatttagattttttttcatgtgttcaaagtatcctctactcatttcattataatagtttatcatacttagaattttaggacggatcaatgagtaagacttgactagatcgtcagtagtaatttgtgcatcgtctattctgcatccgcttcgtcgaataatgtatagcatcgctttgagattctccatagctatcaagtctttatacaatgacatggaaatatctgtgaatactttatacttctccaacatcgatgccttaacatcatcgcctactttagcattgaaaatacgttctattgtgtagatggatgtagcaagatttttaaacaacaatgccatcttacacgatgattgcctcaagtctccaatcttttgtttagaacgattagctacagagttcaacgcttggctgactagcatattattatctttagaaattgtattcttcaatgaggcgtttatcatatctgtgatttcgttagtcatattacagtctgactgggttgtaatgttatccaacatatcacctatggatacggtacacgtaccagcatttgtaataatcctatctaagatgttgtatggcattgcgcagaaaatatcttctcctgtaatatctccactctcgataaatctactcagattattcttaaatgccttattctctggagaaaagatatcagtgtccatcatttcattaatagtatacgcagaaaagataccacgagtatcaattctatccaagatacttatcggttccgagtcacagataatggtttcctctccttcgggagatcctgcatagaaatatctaggacaatagtttctatactgtctgtaactctgataatctctaaagtcactaactgataccatgaaattgagaagatcaaacgctgaagtaatcaatttttctgcctcgtttttactacaactagttttcatcaatgtagcgacgatgtattgtttagttactcttggtctaatactgatgatagagatattattgcttcccataatggatcttctagtagtcaccttaaagcccattgatgcgaatagcagatagataaagtcttggtatgactcctttctaatatagtacggactacctttgtcacccaactttatacccacataagccataacaacctctttaatagccgtttcatgaggtttatcagccatgagcctgagtagttggaagaatctcatgaatcccgtctcagaaagtcctatatgcatgatagatttatctttcctgggaaactctcgtatagtcatagatgaaatactcttcaaagtttctgaaataagattagtaacagtcttacctccgactactctgggtaacaaacatactctaataggtgttttctctgcggagataatatcagaaaggatagagcaataagtagtattattgtgattataaagaccgaatacataacaggtagaatttataaacatcatgtcctgaaggtttttagacttgtattcctcgtaatccataccgtcccaaaacatggatttggtaactttgatagccgtagatctttgttccttcgccaacaggttaaagaaattaataaagaatttgttgtttctatttatgtccacaaattgcacgtttggaagcgccacggttacattcactgcagcattttgaggatcgcgagtatgaagtacgatgttattgtttactggtatatctggaaagaaatctaccagtctaggaataagagattgatatcgcatagaaatagtaaagtttataatctcatcatcgaagagcattttgttaccattgtaataaatatccactctgtcatatgtataaatgaagtactgttcaaacatgatgagatgtttatatgttggcatagtagtgagatcgacgtttggtaatggcaatgtattaagattaactccataatgtctagcagcatctgcgatgttataagcgtcgtcaaagcggggtcgatcttgtattgttatatattgtctaacacctataagattatcaaaatcttgtctgcttaatacaccgttaacaatttttgccttgaattcttttattggtgcattaataacatccttatagaggatgttaaacaaataagtgttatcaaagttaagatctggatatttcttttctgctagaacatccattgagtcggagccatctggtttaatataaccaccgataaatctagctctgtattctgtatccgtcaatctaatattaagaaggtgttgagtgaaaggtggaagatcgtaaaagctgtgagtattaatgataggattagtttccgaactaatgttaattggggtattaataatatctatatttccagcgttaagtgtaacattaaacagttttaattcacgtgacgtggtatcaattaaataattaatgcccaatttggatatagcagcctgaagctcatcttgtttagttacggatcctaatgagttattaagcaatatatcgaacggatgaacgaaggttgttttaagttggtcacatactttgtaatctagacatagatgcggaagaacggtagaaactatacgaaataaatattcagagtcctctaattgatcaagagtaactattgacttaataggcatcatttatttagtattaaatgacgaccgtaccagtgacggatatacaaaacgatttaattacagagttttcagaagataattatccatctaacaaaaattatgaaataactcttcgtcaaatgtctattctaactcacgttaacaacgtggtagatagagaacataatgccgccgtagtgtcatctccagaggaaatatcctcacaacttaatgaagatctatttccagatgatgattcaccggccactattatcgaacgagtacaacctcatactactattattgacgatactccacctcctacttttcgtagagagttattgatatcggaacaacgtcaacaacgagaaaaaagatttaatattacagtatcgaaaaatgctgaagcaataatggaatctagatctatgataacttctatgccaacacaaacaccatccttgggagtagtttatgataaagataaaagaattcagatgttggaggatgaagtggttaatcttagaaatcaacgatctaatacaaaatcatctgataatttagataattttaccaaaatactatttggtaagactccgtataaatcaacagaagttaataagcgtatagccatcgttaattatgcaaatttgaacgggtctcccttatcagtcgaggacttggatgtttgttcagaggatgaaatagatagaatctataaaacgattaaacaatatcacgaaagtagaaaacaaaaaattatcgtcactaacgtgattattattgtcataaacattatcgagcaagcattgctaaaactcggatttgaagaaatcaaaggactgagtaccgatatcacttcagaaattatcgatgtggagatcggagatgactgcgatgctgtagcatcaaaactaggaatcggtaacagtccggttcttaatattgtattgtttatactcaagatattcgttaaacgaattaaaattatttaatttaatacattcccatatccagacaacaatcgtctggattaatctgttcctgtcgtctcataccggacgacatattaatctttttattagtaggcatctttttagatggtttctttttcccagcattaactgagtcgatacctagaagatcgtgattgatctctccgaccattccacgaacttctaattggccgtctctaacggtaccataaactattttaccagcattagtaacagcttggacaatctgaccatccatcgcattgtacgatgtagtagtaactgttgttctacgtctaggagcaccagaagtatttttggagcccttggaggctgatgtagaagaagacgaggattttgattttggtttacatgtaatacattttgaactctttgattttgtatcacatgcgccggcagtcacatctgtttgagaattaagattattgttgcctcctttgacggctgcatctccaccgatttgcgctagtagatttttaagctgtggtgtaatcttattaactgtttcgatataatcatcgtaactgcttctaacggctaaattttttttatccgccatttagaagctaaaaatatttttatttatacagaagatttaactagattatacaatgaactaatatgatccttttccagattatttacaaacttggtattttttggttctggaggaggcgaatttaaattcggacttggattcggattttgtgagttcttgatcttattatacatcgagtataggatggcgacggtaactgctacacaaataccgatcaacaaaagaataccaatcatttattgacaataacttcactattgatcaagtatgcaatatatcatcttttcactaaataagtagtaataatgattcaacaatgtcgagatatatggacgataataatttagttcatggaaatatcgctatgattggtatgaatgactccgctaactctgtggggcgcgcagtgctttccccacatagaataaattagcattccgactgtgataataataccaagtataaacgccataatactcaatactttccatgtacgagtgggactggtagacttactaaagtcaataaaggcgaagatacacgaaagaatcaaaagaatgattccagcgattagcacgccggaaaaataatttccaatcataagcatcatgtccatttaactaataaaaattttaaatcgccgaatgaacaaagtggaatataaaccatataaaaacaatagtttgtactgcaaaaataatatctatttttgttttcgaagatatggtaaaattaaatagtagtacacagcatgttataactaacagcagcaacggctcgtaattacttatcatttactagacgaaaaggtggtgggatattttcttgctcaaataatacgaatatatcacccatccattttatgcgatgtttatatactctaatctttaatagatctatagacgacgggtttaccaacaatatagattttatcgattcatctaatttaaacccttccttaaacgtgaatgatctattatctggcataacgatgaccctacctgatgaatcggacaatgtactgggccatgtagaataaattatcaacgaattatcgtctacgaacatttatatcatttgttttaattttaggacgcgaataaatagatataaaatagaaaataacagatattacaaccagtgttatggccgcgcccaaccaggtaggcagttttattttatcttttactacaggttctcctggatgtacgtcaccaacggcggacgtagttctagtacaattagacgtaagttccgcttgggaattttttaacgctaaagagttaacgttaatcgtgcacccaacgtatttacatctagttctttgaacatcttgattataatataaccattttctatctctagattcgtcggtgcactcatgtaaccaacataccctaggtcctaaatatttatctccggaattagattttggataattcgcgcaccaacaatttctatttcctttatgatcgttacaaaagacgtataatgccgtatccccaaaagtaaaataatcaggacgaataattctaataaactcagaacaatatctcgcatccatatgtttggagcaaatatcggaataagtagacatagccggtttccgttttgcacgtaaccattctaaacaattggggtttccaggatcgtttctacaaaatccagtcatgaaatcgtcacaatgttctgtcttgtaattattattaaatatttttggacagtgtttggtatttgtcttagaacaacattttgccacgctatcactatcgcccaggagataatccttttttataaaatgacatcgttgcccggatgctatataatcagtagcgtgttttaaatccttaatatattcaggagttacctcgttctgataatagattaatgatccaggacgaaatttgaaagaactacatggttctccatgaattaatacatattgtttagcaaattcaggaactataaaactactacaatgatctatcgacataccatctatcaaacaaaacttgggtttaatttctcccggagatgtttcataatagtacgtataactttcttctgcaaacttaacagctctattatattcaggataattaaaacctaattccatatatttgtctcgtatatctgctattcctggtgctattttgattctattaagagtaacagctgcccccattcttaataatcgtcagtatttaaactgttaaatgttggtatatcaacatctaccttatttcccgcagtataaggtttgttgcaggtatactgttcaggaatggttacatttatacttcttctatagtcctgtctttcgatgttcatcacatatgcaaagaacagaataaacaaaataatgtaagaaataatattaaatatctgtgaattcgtaaatacattgattgccataataattacagcagctacaatacacacaatagacattcccacagtgttgccattacctccacgatacatttgagttactaagcaataggtaataactaagctagtaagaggcaatagaaaagatgagataaatatcatcaatatagagattagaggagggctatatagagccaagacgaacaaaatcaaaccgagtaacgttctaacatcattatttttgaagattcccaaataatcattcattcctccataatcgttttgcatcatacctccatctttaggcataaacgattgctgctgttcctctgtaaataaatctttatcaagcactccagcacccgcagagaagtcgtcaagcatattgtaatatcttaaataactcatttatatattaaaaaatgtcactattaaagatggagtataatctttatgccgaactaaaaaaaatgacttgtggtcaacccctaagtctttttaacgaagacggggatttcgtagaagttgaaccgggatcatcctttaagtttctgatacctaagggattttacgcctctccttccgtaaagacgagtctagtatttgaaacattaacaacgaccgataataaaatcactagtatcaatccaacaaatgcgccaaagttatatcctcttcaacgcaaagtcgtatctgaagtagtttctaatatgaggaaaatgatcgaatcaaaacgtcctctatacattactcttcacttggcgtgtggatttggtaagactattaccacgtgttatcttatggctacacacggtagaaaaaccgtcatttgcgtacccaataaaatgttaatacatcaatggaagacacaggtagaggcagtcggattggaacataagatatccatagatggagtaagtagtctattaaaggaactaaagactcaaagtccggatgtattaatagtagtcagtagacatctgacaaacgatgccttttgtaaatatatcaataagcattatgatttgttcatcttggatgaatcacatacgtataatctgatgaacaatacagcagttacaagatttttagcgtattatcctccgatgatgtgttattttttaactgctacacctagaccagctaaccgaatttattgtaacagtattattaatattgccaagttatccgatctaaaaaaaactatctatgcggtagatagtttttttgagccatattccacagacaatattagacatatggtaaaacgactagatggaccatctaataaatatcatatatataccgagaagttattatctgtagacgagcctagaaatcaacttattcttaataccctggtagaagaattcaagtcaggaactattaatcgcattttagttattactaaactacgtgaacatatggtattattctacaaacgattattagatcttttcggaccagaggttgtatttataggagacgcccaaaatagacgtactccagatatggtcaaatcaatcaaggaactaaatagatttatattcgtatccaccttattttattccggtactggtttagatattcctagtttggattcgttgttcatttgctcggcagtaatcaacaatatgcaaatagagcaattactagggagggtatgtcgagaaacagaactattagataggacggtatatgtatttcctaacacatccatcaaagaaataaagtacatgataggaaatttcatgcaacgaattattagtctgtctgtagataaactaggatttaaacaagaaagttatcggaaacatcaagaatccgatcccacttctgtatgtacaacatcctccagagaagaacgtgtattaaatagaatatttaactcgcaaaatcgttaagaagtttaagcgacgatccgcatgctgcgcaggccagtgtattacccctcatagtattaatataatccaatgatacttttgtgatgtcggaaatcttaaccaatttagactgacaggcagaacacgtcatgcaatcatcatcgtcatcgataactgtagtcttgggcttctttttgcggctcttcattccggaacgcacattggtgctatccatttaggtagtaaaaaataagtcagaatatgccctataacacgatcgtgcaaaacctggtatatcgtctctatctttatcacaatatagtgtatcgacatctttattattattgacctcgtttatcttggaacatggaatgggaacatttttgttatcaacggccacctttgccttaattccagatgttgtaaaattataactaaacagtctatcatcgacacaaatgaaattcttgtttagacgtttgtagtttacgtatgcggctcgttcgcgtctcattttttcagatattgcaggtactataatattaaaaataagaatgaaataacataggattaaaaataaagttatcatgacttctagcgctgatttaactaacttaaaagaattacttagtctgtacaaaagtttgaaattttcagattctgcggctatagaaaagtataattctttggtagaatggggaacatctacttactggaaaataggcgtgcaaaaggtagctaatgtcgagacgtcaatatctgattattatgatgaggtaaaaaataaaccgtttaatattgatccgggctattacattttcttaccggtatattttgggagcgtctttatttattcgaagggtaaaaatatggtagaacttggatctggaaactcttttcaaataccagatgatatgcgaagtgcgtgtaacaaagtattagacagcgataacggaatagactttctgagatttgttttgttaaacaatagatggataatggaagatgctatatcaaaatatcagtctccagttaatatatttaaactagctagtgagtacggattaaacatacccaaatatttagaaattgaaatagaggaagacacattatttgacgacgagttatactctattatagaacgctcttttgatgataaatttccaaaaatatccatatcgtatattaagttgggagaacttaggcggcaagttgtagactttttcaaattctcgttcatgtatattgagtccatcaaggtagatcgtataggagataatatttttattcctagcgttataacaaaatcaggaaaaaagatattagtaaaagatgtagaccatttaatacgatctaaggttagagaacatacatttgtaaaagtaaaaaagaaaaacacattttccattttatacgactatgatgggaacggaacagaaactagaggagaagtaataaaacgaattatagacactataggacgagactattatgttaacggaaagtatttctctaaggttggtagtgcaggcttaaagcaattgactaataaattagatattaatgagtgcgcaactgtcgatgagttagttgatgagattaataaatccggaactgtaaaacgaaaaataaaaaaccaatcagcatttgatttaagcagagaatgtttgggatatccagaagcagattttataacgttagttaataacatgcggttcaaaatagaaaattgtaaggttgtaaatttcaatattgaaaatactaattgtttaaataacccgagtattgaaactatatatggaaactttaaccagttcgtctcaatctttaatatcgtcaccgatgtcaaaaaaagattattcgagtgaaataatatgcgcctttgatataggtgcaaaaaatcctgccagaactgttttagaagtcaaggataactccgttagggtattggatatatcaaaattagactggagttctgattgggaaaggcgcatagctaaagatttgtcacaatatgaatacactacagttcttctagaacgtcagcctagaaggtcgccgtatgttaaatttatctattttattaaaggctttttatatcatacatcggctgccaaagttatttgcgtctcgcctgtcatgtctggtaattcatatagagatcgaaaaaagagatcggtcgaagcatttcttgattggatggacacattcggattgcgagactccgttccggatagacgcaaattagacgatgtagcggatagtttcaatttggctatgagatacgtattagataaatggaatactaattatacaccttataataggtgtaaatctagaaattacataaaaaaaatgtaataacgttagtaacgccattatggataatctatttacctttctacatgaaatagaagatagatatgccagaactatttttaactttcatctaataagttgcgatgaaataggagatatatatggtcttatgaaagaacgcatttcctcagaggatatgtttgataatatagtatataataaagatatacatcctgccattaagaaactagtgtattgcgacatccaacttactaaacacattattaatcagaatacgtatccggtatttaacgattcttcacaagtgaaatgttgtcattatttcgacataaactcagataatagcaatattagctctcgtacagtagagatatttgagagggaaaagtcatctcttgtatcatatattaaaactaccaataagaagagaaaggtcaattacggcgaaataaagaaaactgttcatggaggcactaatgcaaattacttttccggtaaaaagtctgacgagtatctgagtactacagttagatccaacattaatcaaccttggatcaaaaccatttctaagagaatgagagtagatatcattaatcactctatagtaacgcgtggaaaaagctctatattacaaactatagaaattatttttactaatagaacatgtgtgaaaatattcaaggattctactatgcacattattctatccaaggacaaggatgaaaaggggtgtatacacatgattgacaaattattctatgtctattataatttatttctgttgttcgaagatatcatccaaaacgagtactttaaagaagtagctaatgttgtaaaccacgtacttacggctacggcattagatgagaaattattcctaattaagaaaatggctgaacacgatgtttatggagttagcaatttcaaaatagggatgtttaacctgacatttattaagtcgttggatcataccgttttcccctctctgttagatgaggatagcaaaataaagttttttaaggggaaaaagctcaatattgtagcattacgatctctggaggattgtataaattacgtgactaaatccgagaatatgatagaaatgatgaaggaaagatcgactattttaaatagcatagatatagaaacggaatcggtagatcgtctaaaagaattgcttctaaaatgaaaaaaaacactgattcagaaatggatcaacgactagggtataagtttttggtgcctgatcctaaagccggagttttttatagaccgttacatttccaatatgtatcgtattctaattttatattgcatcgattgcatgaaatcttgaccgtcaagcggccactcttatcgtttaagaataatacagaacgaattatgatagaaattagcaatgttaaagtgactcctccagattactcacctataatcgcgagtattaaaggtaagagttatgatgcattagccacgttcactgtaaatatctttaaagaggtaatgaccaaagagggtatatccatcactaaaataagtagttatgagggaaaagattctcatttgataaaaattccgctactaataggatacgggaataaaaatccacttgatacagccaagtatcttgttcctaatgtcataggtggagtctttatcaataaacaatctgtcgaaaaagtaggaattaatctagtagaaaagattacaacatggccaaaatttagggttgttaagccaaactcattcactttctcgttttcctccgtatcccctcctaatgtattaccgacaagatatcgccattacaagatatctctggatatatcacaattggaagcgttgaatatatcatcgacaaagacatttataacggtcaatattgttttgctgtctcaatatttatctagagtgagtctagaattcattagacgtagtttatcatacgatatgcctccagaagttgtctatctagtaaacgcgataatagatagtgctaaacgaattactgaatctattactgactttaatattgatacatacattaatgacctggtggaagctgaacacattaaacaaaaatctcagttaacgatcaacgagttcaaatatgaaatgctgcataactttttacctcatatgaactatacacccgatcaactaaagggattttatatgatatctttactaagaaagtttctctactgtatctaccacacttctagatatccagatagagattcgatggtttgtcatcgcatcctaacgtacggcaaatattttgagacgttggcacatgatgaattagagaattacataggcaacatccgaaacgatatcatgaacaatcacaagaacagaggcacttacgcggtaaacattcatgtactaacaactcccggacttaatcacgcgttttctagcttattgagtggaaagttcaaaaagtcagacggtagttatcgaacacatcctcactattcatggatgcagaatatttctattcctaggagtgttggattttatccggatcaagtaaagatttcaaagatgttttctgtcagaaaataccatccaagtcaatatctttacttttgttcatcggacgttccggaaagaggtcctcaggtaggtttagtatctcaattgtctgtcttgagttccattacaaatatactaacgtctgagtatttggatttggaaaagaaaatttgtgagtatatcagatcatattataaagatgatataagttactttgaaacaggatttccaatcactatagaaaatgctctagtcgcatctcttaatccaaatatgatatgtgattttgtaactgactttagacgtagaaaacggatgggattcttcggtaacttggaggtaggtattactttagttagggatcacatgaatgaaattcgcattaatattggagcgggaagattagtcagaccattcttggttgtggataacggagagctcatgatggatgtgtgtccggagttagaaagcagattagacgacatgacattctctgacattcagaaagagtttccgcatgtcatcgaaatggtagatatagaacaatttacttttagtaacgtatgtgaatcggttcaaaaatttagaatgatgtcaaaggatgaaagaaagcaatacgatttatgtgactttcctgccgaatttagagatggatatgtggcatcttcattagtgggaatcaatcacaattctggacccagagctattcttggatgtgctcaagctaaacaagctatctcttgtctgagttcggatatacgaaataaaatagacaatggaattcatttgatgtatccagagaggccaatcgtgattagtaaggctttagaaacttcaaagattgcggctaattgcttcggccaacatgttactatagcattaatgtcgtacaaaggtatcaatcaagaggatggaattatcatcaaaaaacaatttattcagagaggcggtctcgatatagttaccgcaaagaaacatcaagtagaaattccgttggaaaactttaataacaaagaaagagataggtctaacgcctattcaaaattagaaagtaatggattagttagactgaatgctttcttggaatccggagacgctatggcacgaaatatctcatcaagaactcttgaagatgattttgctagagataatcagattagcttcgatgtttccgagaaatataccgatatgtacaaatctcgcgttgaacgagtacaagtagaacttactgacaaagttaaggtacgagtattaaccatgaaagaaagaagacccattctaggagataaatttaccactagaacgagtcaaaagggaacagtcgcgtatgtcgcggatgaaacggaacttccatacgacgaaaatggtatcacaccagatgtcattattaattctacatccatcttctctagaaaaactatatctatgttgatagaggttattttaacagccgcatattctgctaagccgtacaacaataagggagaaaaccgacctgtctgttttcctagtagtaacgaaacatccatcgatacatatatgcaattcgctaaacaatgttatgagcattcaaatccgaaattgtccgatgaagaattatcggataaaatcttttgtgaaaagattctctatgatcctgaaacggataagccttatgcatccaaagtattttttggaccaatttattacttgcgtctgaggcatttaactcaggacaaggcaaccgttagatgtagaggtaaaaagacgaagctcattagacaggcgaatgagggacgaaaacgtggaggaggtatcaagttcggagaaatggagagagactgtttaatagcgcatggcgcagccaatactattacagaagttttaaaagactcagaagaggattatcaagatgtgtatgtttgtgaaaattgtggagacatagcagcacaaatcaagggtattaatacatgtcttagatgttcaaaacttaatctctctcctctcttaacaaaaattgataccacgcacgtatctaaagtatttcttactcaaatgaacgccagaggcgtaaaagtcaaattagatttcgaacgaaggcctccttcgttttataaaccattagataaagttgatctcaagccgtcttttctggtgtaatattctagtttggtagtagatacatatcaatatcatcaaattcgagatccgaattataaaatgggcgtggattgttaactatagaatcggacgtctgatattcgaaaatctgtggagttttaggttttggtggaggtgtaactgctacttgggatactgaagtctgatattcagaaagctgggggatgttctggttcgacatccaccgatggtgtcacatcactaatcggttcggtaacgtctgtggatggaggtgctacttctacagaacctgtagcctcagttgtcaacggagatacatttttaatgcgaggaaatgtataatttggtaatggtttctcatgtggatctgaagaagaggtaagatatctactagaaagataccgatcacgttctagttctcttttgtagaacttaactttttctttctcagcatctagttgatattccaacctcttcacgttactacgttcagattccaattcacgttcgcatgggttacctccgcagtttttacgagcgatttcacgttcagccttcatgcgtctctccttctctctatcgagtttatcagagcagtctttctgaaggcgatcgaactccataaatttctccaacgctttgattgtttccatagatttccgaagttcagcttttaggactgtgattctttttctttcgaattcacagctggatgtgcaaccgtttccattaccgccatctctaagtttcttttctagatcggcaacatttcatccccatgccttttacattcctcgagtctactgtcgtcgaaatatcgttccagctccttttcgacatcaataactttagcacgttgtctctcaagctctcttttgtagttatctgattccctggcacgtttaagatcttcatgcaattgagtcagctcttaacacaatctcttgcttcttcgtcatagtacttacaatcactatgggatccattgttaccacgtctacactcggcgagctcgcgtttaagagattcaatttcccgtttgtattggtccatgtttccattgctaccaccattagatttacaggctgctagttgtcgttcgagatcagaaatacgggttttcttggaattgatttcgtcgatgtacttggcatcgaaacacttattaagttctttttccaattctacgattttatttctttcgcgagtcaattccctcctgtagtaactatctgttttgtcagattcacgctctctacgtagactttcttgcaagttactaatttgttccctagcacgtccgagtttagttttatatgctgaatagagttctgattcatcctttgagcagatctctagcgatcgtttaagattcctgattctagtctttagcctatttacctcctcagaagatgttccgttaccgttgcgtttacactcgttaagctgtctatcaagatccatgattctatctctaagacgttgcatctctctttccatatcagcattgctttcattattacgtctgcagtcactcaactgtctttcaatatctgagattctatctctaagacgtcgcatctctctctgtttcggcattggtttcattattacgtctacagtcgttcaactgtctttcaagatctgatattctagattggagtctgctaatctctgtagcattttcacggcattcactcagttgtctttcaagatctgagattttagattggagtctgctaatctctgtaagatttcctcctccgctctcgatgcagtcggtcaacttattctctagttctctaatacgcgaacgcagtgcatcaacttcttgcgtgtcttcctggttgcgtgtacattcatcgagtctagattcgagatctctaacgcgtcgtcgttcttcctcaagttctctgcgtactacagaaagcgtgtccctatcttgttgatatttagcaatttctgattctagagtactgattttgcttacgtagttactaatagttgtcttggccttatcaagatcctccttgtatttgtcgcattccttgatatccctacgaagtctggacagttcccattcgacattacgacgtttatcgatttcagctcggagatcgtcatcgcgttgttttagccacatacgactgagttcaagttctcgttgacaagatccatctacttttccattcctaatagtatccagttccttttctagttctgaacgcatttctcgttccctatcaagcgattctctcaattctcggatagtcttcttatcaatttctaataaatctgaaccatcatctgtcccattttgaatatccctgtgttctttgatctcttttgtaagtcggtcgattctttcggttttataaacagaatccctttccaaagtcctaatcttactgagtttatcactaagttctgcattcaattcggtgagttttctcttggcttcttccaactctgttttaaactctccactatttccgcattcttcctcgcatttatctaaccattcaattagtttattaataactagttggtaatcagcgattcctatagccgttcttgtaattgtgggaacataattaggatcttctaatggattgtatggcttgatagcatcatctttatcattattagggggatggacaaccttaattggttggtcctcatctcctccagtagcgtgtggttcttcaataccagtgttagtaataggcttaggcaaatgcttgtcgtacgcgggcacttcctcatccatcaagtatttataatcgggttctacgtctgaatattcttttctaagagacgcgacttcgggagttagtagaagaactctgtttctgtatctatcaacgctggaatcaatactcaagttaaggatagcgaatacctcatcgtcatcatccgtatcttctgaaacaccatcatatgacatttcatgaagtctaacgtattgataaatagaatcagatttagtattaaacagatccttaacctttttagtaaacgcatatgtatattttagatctccagatttcataatatgatcacatgccttaaatgtcagtgcttccatgatataatctggaacactaatgggtgacgaaaaagatacagcaccatatgctacgttgataaataaatctgaaccactaagtagataatgattaatgttaaggaagaggaaatattcagtatatagatatgccttagcatcatatcttgtactaaacacgctaaacagtttattgatgtgatcaatttccaacagaataattagagcagcgggaataccaacaaacatattaccacatccgtattttctatgaatatcacatatcatgttaaaaaatcttgatagaagagcgaatatctcgtctgacttaatgagtcgtagttcagcagcaacataagtcataactgtaaatagaacatactttcctgtagtgttgattctagactccacatcaacaccattattaaaaatagttttatatacatctttaatctgctctccgttaatcgtcgaacgttctagtatacggaaacactttgatttcttatctgtagttaatgacttagtgatatcacgaagaatattacgaattacatttcttgtttttcttgagagacctgattcagaactcaactcatcgttccatagtttttttacctcagtggcgaaatctttggagtgcttggtacatttttcaataaggttcgtgacctccatttattataaaaaattttattcaaaacttaactacaatcgggtaattataaaatcgtagatctcccatgtggtggaatactaccatctatcgcatgtggatggacagtaggtaatggccatgggaacagtaatgtttgcatatttatctttcttgccagtattactgcatattgtcccaatgtttcgatgtgatgttctaacctatcaactgccgctgtatcacaacaatagtgtccgatgaaattaagattatgatccaatgtgtttaatatatgattatcaagtcttatacgatccgcgtcttttttgacaggatcaggttcttctacaggaagaagtttcggcctcttatgatattcatgtctgggaaacggtggtctagggtgaggctccggtatcggagtgggttttggattataatcatcatcgtctatgacatcatcttcgacttcgatatttattttgctatcttgatgatgtcctgtatcagttgcattttcagcactcgactgaatattagcgcattcattgtctattattaccatatttctaaacccaaaatgtatgtgttgaacatcagtactatcgttgatgagtcttatagcatgaattcgcttatcgttatcgggtttatcttctgtcaccttagcaattccttttttattaaactctacataatcatatccatttctattgtttgttctaatataaacgagtatagcatcattgctaaatttttcaatagtatcgaaaacagaatatcctaaaccatataatatatattcagggacactcaaactaaatgtccaggattctcctaaatacgtaaactttaatagtgcgaaatcattcaaaaatctaccacttatagatagatagtacataaatgcgtatagtagtctacctatctctttattatgaaaaccggcattacgatcatatatgtcgtgatatacctgtgatccgtttacgttaaaccataaatacatgggtgatcctataaacatgaatttatttctaattctcagagctatagttaattgaccgtgtaatatttgcttacatgcatacttgatacgctcattaataaaatttttatcattgctcgttatctcagaatcgtatatataaggagtaccatcgtgattcttaccagatattatacaaaatactatatataaaatatattgaccaacgttagtaatcatataaatgtttaacgttttaaattttgtattcaatgatccattatcatacgctagcatggtcttatgatattcattctttaaaatataatattgtgttagccattgcattggggctcctaatggagattttttattctcatccattttaggataggctttcataaagtccctaataacttcgtgaataatgtttctatgttttctactgatgcatgtatttgcttcgatttttttatcccatgtttcatctatcatagatttaaacgcagtaatgctcgcaacattaacatcttgaaccgttggtacaattccgttccataaatttataatgttcgccatttatataactcattttttgaatatacttttaattaacaaaagagttaagttactcatatgggcgccgtccagtctgaacatcaatctttttagccagagatatcatagccgctcttagagtttcagcgtgattttccaacctaaatagaacttcatcgttgcgtttacaacacttttctatttgttcaaactttgttgttacattagtaatctttttttccaaattagttagccgttgtttgagagtttcctcattgtcgtcttcatcggctttaacaattgcttcgcgtttagcctctggctttttagcagcctttgtagaaaaaaattcagttgctggaattgcaagatcgtcatctccggggaaaagagttccgtccatttaaagtacagattttagaaactgacactctgcgttatttatatttggtacaacacatggattataaatatcgatgttaataacatcagaaaatgtaaagtctatacattgttgcatcgtgttaaattttctaatggatctagtattattgggtccaacttctgcctgaaatccaaatatggaagcggatacaaaaccgtttcctggataaaccacacatctccacttttgctttacatcagaaattgtgtcgttgacatcttgaactctcctatctaatgccggtgttccacctatagattttgaatattcgaatgctgcatgagtagcattaaattccttaatattgccataattttcatatattgagtaaccctggataaaaagtaaacacaccgcagccgtcgctaccacaataaaaaaaattgatagagagttcatttataatctattagaagctgacaaaatttttttacacgcatcagacaatgctttaataaatagttcaacatctacttttgtcatatcgaaccgatggtatgattctaacctagaattacatccgaaaaagttgactatgttcatagtcattaagtcattaacaaacaacattccagactctggattataagacgatactgtttcgtcacaattacctaccttaatcatgtgattatgaatattggctattagagcaccttctaagaaatctataatatctttgaaacacgatttaaaatcaaaccacgaatatacttctacgaagaaagttagtttacccataggagaaataactataaatggagatctaaatacaaaatccggatctatgatagttttaacattattatattctctattaaatacctccacatctaaaaatgttaattttgaaactatgtcttcgtttattaccgtacctgaactaaacgctataagctctattgtttgagaactctttaaacgatattcttgaaatacatgtaacaaagtttcctttaactcggtcggtttatctaccatagttacagaatttgtatccttatctataatataataatcaaaatcgtataaagttatataattatcgcgttcagattgggatcttttcaaatagactaaaaaccccatttctctagtaagtatcttatgtatatgtttgtaaaatatcttcatggtgggaatatgctctaccgcagttagccattcctcattgacagcggtagatgtattagacaaaactattccaatgtttaacaagggccattttacgagattattaaatccttgtttgataaatgtagccaatgagggttcgagttcaacgacgattgaattctcttcccgcggatgctgcatgatgaacgacgggatgttgttcgattgatttggaattctttttcgactttttgtttatattaaatattttaaaatttatagcggatagcaattcatgtaccacggataatgtagacgcgtattgcgcatcgatatctttattattagataaatttatcaataaatgtgagaagtttgcctcgttaaggtcttccatttaaatattatataaacatttgtgtttgtatcttattcgtcttttatggaatagttttttactagtaaagctgcaattacacactttgtccgtaaaacataaatataaacaccagcttttatcaatcgttccaaaaagtcgacggcggacatttttaacatggcatctattttaaatacacttaggtttttggaaaaaacatcattttataattgtaacgattcaataactaaagaaaagattaagattaaacataagggaatgtcatttgtattttataagccaaagcattctaccgttgttaaatacttgtctggaggaggtatatatcatgatgatttggttgtattggggaaggtaacaattaataatctaaagatgatgctattttacatggatttatcatatcatggagtgacaagtagtggagcaatttacaaattgggatcgtctatcgatagactttctctaaataggactattgttacaaaagttaataattatgatgatacattttttgacgacgatgattgatcgctattgcacaattttgtttttttactttctaatatagcgtttagattctttttcatgtgcgaatattgatttactaaaatatcgatgtttaacttttgttctatgacgtccttatcagcggtatcggtacatatacgtaattcaccttcacaaaatacggagtcttcgataataatagccaatcgattattggatctagctgtctgtatcatattcaacatgtttaatatatcctttcgtttcccctttacaggcatcgatcgtagcatattttccgcgtctgagatggaaatgttaaaactacaaaaatgcgtaatgttagcccgtcctaatattggtacgtgtctataagtttggcatagtagaataatagacgtgtttaaatgccttccaaagtttaagaattctattagagtattgcattttgatagtttatcacctacatcatcaaaaataagtaaaaagtgtgctgattttttatgattttgtgcgacagcaatacatttttctatgttacttttagttcgtatcagattatattctagagattcctgactactaacgaaattaatatgatttggccaaatgtatccatcataatctgggttataaacgggtgtaaacaagaatatatgtttatattttttaactagtgtagaaaacagagatagtaaatagatagtttttccagatccagatcctcccgttaaaaccattctaaacggcatttttaataaattttctcttgaaaattgtttttcttggaaacaattcataattatatttacagttactaaattaatttgataataaatcaaaatatggaaaactaaggtcgttagtagggaggagaacaaagaaggcacatcgtgacataaataacatttattatcatgatgacaccagaaaacgacgaagagcagacatctgtgttctccgctactgtttacggagacaaaattcaaggaaagaataaacgcaaacgcgtgattggtctatgtattagaatatctatggttatttcactactatctatgattaccatgtccgcgtttctcatagtgcgcctaaatcaatgcatgtctgctaacgaggctgctattactgacgccgctgttgccgttgctgctgcatcatctactcatagaaaggttgcgtctagcactacacaatatgatcacaaagaaagctgtaatggtttatattaccagggttcttgttatatattacattcagactaccagttattctcggatgctaaagcaaattgcactgcggaatcatcaacactacccaataaatccgatgtcttgattacctggctcattgattatgttgaggatacatggggatctgatggtaatccaattacaaaaactacatccgattatcaagattctgatgtatcacaagaagttagaaagtatttttgtgttaaaacaatgaactaatatttatttttgtacattaataaatgaaatcgcttaatagacaaactgtaagtaggtttaagaagttgtcggtgccggccgctataatgatgatactctcaaccattattagtggcataggaacatttctgcattacaaagaagaactgatgcctagtgcttgcgccaatggatggatacaatacgataaacattgttatttagatactaacattaaaatgtctacagataatgcggtttatcagtgtcgtaaattacgagccagattgcctagaccggatactagacatctgagagtattgtttagtattttttataaagattattgggtaagtttaaaaaagaccaatgataaatggttagatattaataatgataaagatatagatattagtaaattaacaaattttaaacaactaaacagtacgacggatgctgaagcgtgttatatatacaagtctggaaaactggttaaaacagtatgtaaaagtactcaatctgtactatgtgttaaaaaattctacaagtgacaacaaaaaatgaattaataataagtcgttaacgtacgccgccatggacgccgcgtttgttattactccaatgggtgtgttgactataacagatacattgtatgatgatctcgatatctcaatcatggactttataggaccatacattataggtaacataaaaactgtccaaatagatgtacgggatataaaatattccgacatgcaaaaatgctactttagctataagggtaaaatagttcctcaggattctaatgatttggctagattcaacatttatagcatttgtgccgcatacagatcaaaaaataccatcatcatagcatgcgactatgatatcatgttagatatagaagataaacatcagccattttatctattcccatctattgatgtttttaacgctacaatcatagaagcgtataacctgtatacagctggagattatcatctaatcatcaatccttcagataatctgaaaatgaaattgttgtttaattcttcattctgcatatcagacggcaatggatggatcataattgatgggaaatgcaatagtaattttttatcataaaagttgtaaagtaaataataaaacaataaatattgaactagtagtacgtatattgagcaatcagaaatgatgctggtacctcttatcacggtgaccgtagttgcgggaacaatattagtatgttatatattatatatttgtaggaaaaagatacgtactgtctataatgacaataaaattatcatgacaaaattaaaaaagataaagagttctaattccagcaaatctagtaaatcaactgatagcgaatcagactgggaggatcactgtagtgctatggaacaaaacaatgacgtagataatatttctaggaatgagatattggacgatgatagcttcgctggtagtttaatatgggataacgaatccaatgtcatggcgcctagcacagaacacatttacgatagtgttgctggaagcacgctgctaataaataatgatcgtaatgaacagactatttatcagaacactacagtagtaattaatgagacggagactgttgaagtacttaatgaagataccaaacagaatcctaactattcatccaatcctttcgtaaattataataaaaccagtatttgtagcaagtcaaatccgttcattacagaactcaacaataaatttagtgagaataatccgtttagacgagcacatagcgatgattatcttaataagcaagaacaagatcatgaacacgatgatatagaatcatcggtcgtatcattggtgtgattagtttcctttttataaaattgaagtaatatttagtattattgctgccgtcacgttgtacaaatggagatattccctgtattcggcatttctaaaattagcaattttattgctaataatgactgtagatattatatagatacagaacatcaaaaaattatatctgatgagatcaatagacagatggatgaaacggtacttcttaccaacatcttaagcgtagaagttgtaaatgacaatgagatgtaccatcttattccccatagactatcgactattatactctgtattagttctgtcggaggatgtgttatctctatagataatgacatcaatgacaaaaatattctaacatttcccattgatcatgctgtaatcatatccccactgagtaaatgtgtcgtagttagcaagggtcctacaaccatattggttgttaaagcggatatacccagcaaacgattggtaacatcgtttacaaacgacatactgtatgtaaacaatctgtcactgattaattatttgccgttgtctgtattcattattagacgagtcaccgactatttggatagacacatatgcgatcagatatttgcgaataataagtggtattccattataaccatcgacgataagcaatatcctattccatcaaactgtataggtatgtcctctgccaagtacataaattctagcatcgagcaagatactttaatacatgtttgtaacctcgagcatccattcgacttagtatacaaaaaaatgcagtcgtacaattctgtacctatcaaggaacaaatattgtacggtagaattgataatataaatatgagcattagtatttctgtggattaatagatttctagtatggggatcattaatcatctctaatctctaaatacctcataaaacgaaaaaaaagctattatcaaatactgtacggaatggattcattctcttctctttttatgaaactctgttgtatatctactgataaaactggaagcaaaaaatctgataaaaagaataagaataagatcaaggattatatggaacacgattattataaaataacaatagttcctggttcctcttccacgtctactagctcgtggtattatacacatgcctagtaatagtctctttgcgttgacggaaagcagactagaaataacaggctaaaatgttcagacaccataatagttcccaacccagataataacagagtaccatcaacacattcctttaaactcaatcccaaacccaaaaccgttaaaatgtatccggccaattgatagtagataatgaggtgtacagcgcatgataatttacacagtaaccaaaatgaaaatactttagtaattataagaaatatagatggtaacgtcatcatcaacaatccaataatatgccggagagtaaacattgacggataaaacaaaaatgctccgcataactctatcatggcaataacacaaccaaatacttgtaagattcctaaattagtagaaaatacaacggatatcgatgtataagtgatctcgagaaataataagaataaagtaatgcccgtaaagataaacatcaacattgtttggtaatcattaaaccaattagtatgaagttgaactaatttcacagtagattttattccagtgttatcctcgcatgtatacgtacctggtaagatatctttatattctataatcaatgagacatcactatccgataacgaatgaagtctagcactagtatgccatttacttaatatggtcgtcttggaagttttattataagttaaaatatcatggttgtccaatttccatctaatatactttgtcggattatctatagtacacggaataatgatggtattattacatgctgtatactctatagtctttgtagatgttataatcataaaagtacagaggtatatcaacgatattctaactcttgacattttttatttatttaaaatgatacctttgttatttattttattctattttgctaacggtatcgaatggcataagtttgaaacgagtgaagaaataatttctacttacttattagacgacgtattatacacgggtgttaatggggcggtatacacattttcaaataataaactaaacaaaactggtttagctaatactaattatatcacaacatctataaaagtagaggatgcggataaggatacattagtatgcggaaccaataacggaaatcccaaatgttggaaaatagacggttcagacgacccaaaacatagaggtagaggatacgctccttatcaaaatagcaaagtaacgataatcagtcacaacggatgtgtactatctgacataaacatatcaaaagaaggaattaaacgatggagaagatttgacggaccatgtggttatgatttatacacggcggataacgtaattccaaaagatggtttacgaggagcattcgtcgataaagatggtacttatgacaaagtttacattcttttcactgatactatcggctcaaagagaattgtcaaaattccgtatatagcacaaatgtgcctaaacgacgaaggtggtccatcatcattgtctagtcatagatggtcgacgtttctcaaagtcgaattagaatgtgatatcgacggaagaagttatagacaaattattcattctagaactataaaaacagataatgatacgatactatatgtattcttcgatagtccgcattatgtacctattctatgaataccattaaacaatctttttctacgtcaaaattggaaggatatacaaagcaattgccgtctccagctcctggtatatgtctaccagctggaaaagttgttccacataccacgtttgaagtcatagaaaaatataatgtactagatgatattataaagcctttatctaaccaacctatcttcgaaggaccgtctggtgttaaatggttcgatataaaggagaaggaaaatgaacatcgggaatatagaatatacttcataaaagaaaattctatatattcgttcgatacaaaatctaaacaaactcgtagctcgcaagtcgatgcgcgactattttcagtaatggtaacttcgaaaccgttatttatagcagatatagggataggagtaggaatgccacaaatgaaaaaaatacttaaaatgtaatcttaatcgagtacaccacacgacaatgaacaaacataagacagattatgctggttatgcttgctgcgtaatatgcggtctaattgttggaattatttttacagcgacactattaaaagttgtagaacgtaaattagttcatacaccatcaatagataaaacgataaaagatgcatatattagagaagattgtcctactgactggataagctataataataaatgtatccatttatctactgatcgaaaaacctgggaggaaggacgtaatgcatgcaaagctctaaatccaaattcggatctaattaagatagagactccaaacgagttaagttttttaagaagcattagacgcggatattgggtaggagaatccgaaatattaaaccagacaaccccatataattttatagctaagaatgccacgaagaatggaactaaaaaacggaaatatatttgtagcacaacgaatactcccaaactgcattcgtgttacactatataacaattacactacatttttatcataccactacttcggttagatgttttagaaaaaaataaatatcgccgtaccgttcttgtttttataaaaataacaattaacaattatcaaattttttctttaatattttacgtggttgaccattcttggtggtaaaataatctcttagtgttggaatggaatgctgtttaatgtttccacactcatcgtatattttgacgtatgtagtcacatcgtttacgcaatagtcagactgtagttctatcatgcttcctacattagaaggaggaacagttttaaagtctcttggttttaatctattaccgttagttttcatgaaatcctttgttttatccacttcacattttaaataaatgtccactatacattcttctgttaattttactagatcgtcatgggtcatagaatttataggttccgtagtccatggatccaaactagcaaacttcgcgtatacggtatcgcgattagtgtatacaccaactgtatgaaaattaagaaaacagtttaatagatcaacagaaatatttaatcctccgtttgatacagatgcaccatatttatggattttggattcacacgttgtttgtctgaggggttcgtctagcgttgcttctacataaacttctattcccatatattctttattgtcagaatcgcataccgatttatcatcatacactgtttgaaaactaaatggtatacacatcaaaataacaaatactaacgagtacattctgcaatattgttatcgtaattggaaaaatagtgttcgagtgagttggattatgtgagtattggattgtatattttattttatattttgtaataagaataaaatgctaatgtcaagtttattccaatagatgtcttattaaaaacatatataataaataacaatggctgaatggcataaaattatcgaggatatctcaaaaaataataagttcgaggatgccgccatcgttgattacaagactacaaagaatgttctagctgctattcctaacagaacatttgccaagattaatccgggtgaaattattcctctcatcactaatcgtaatattctaaaacctcttattggtcagaaatattgtattgtatatactaactctctaatggatgagaacacgtatgctatggagttgcttactgggtacgcccctgtatctccgatcgttatagcgagaactcataccgcacttatatttttgatgggtaagccaacaacatccagacgtgacgtgtatagaacgtgtagagatcacgctacccgtgtacgcgcaactggtaattaaaataaaaagtaatattcatatgtagtgtcaattttaaatgatgatgatgaaatggataatatccatattgacgatgtcaataatgccggtattggcatacagctcatcgatttttagatttcattcagaggatgtggaattatgttatgggcatttgtattttgataggatctataatgtagtaaatataaaatataatccgcatattccatatagatataattttattaatcgcacgttaaccgtagatgaactagacgataatgtcttttttacacatggttattttttaaaacacaaatatggttcacttaatcctagtttgattgtctcattatcaggaaacttaaaatataatgatatacaatgctcagtaaatgtatcgtgtctcattaaaaatttggcaacgagtacatctactatattaacatctaaacataagacttattctctacatcggtccacgtgtattactataataggatacgattctattatatggtataaagatataaatgacaagtataatggcatctatgattttactgcaatatgtatgctaatagcgtctacattgatagtgaccatatacgtgtttaaaaaaataaaaatgaactcttaattatgctatgctattagaaatggataaaatcaaaattacggttgattcaaaaattggtaatgttgttaccatatcgtataacttggaaaagataactattgatgtcacacctaaaaagaaaaaagaaaaggatgtattattagcgcaatcagttgctgtcgaagaggcaaaagatgtcaaggtagaagaaaaaaatattatcgatattgaagatgacgatgatatggatgtagaaagcgcataatacgatctataaaaataagtatataaatactttttatttactgtactcttactgtgtagtggtgataccctactcgattatttttttaaaaaaatacttattctgattcttctagccatttccgtgttcgttcgaatgccacatcgacgttaaagataggggagtagttgaaatctagttctgcattgttggtacgcacctcaaatgtagtgttggatatcttcaacgtatagttgttgagtagtgatggttttctaaatagaattctcttcatatcattcttgcacgcgtacatttttagcatccatcttggaattctagatccttgttctattcccaatggtttcatcaatagaagattaaacatatcgtacgaacacgatggagagtaatcgtagcaaaagtaagcatttcctttaatctcagatcccggatactggatatattttgcagccaacacgtgcatccatgcaacatttcctacatatacccggctatgcaccgcgtcatcatcgactgtacgatacataatgttaccgtgttgcttacattgctcgtaaaagactttcgtcaatttgtctccttctccgtaaattccagtgggtcttaggcaacaagtatacaattttgctccattcatgattacggaattattggctttcataaccagttgctcggccatacgtttactttttgcgtatacatgtcctggtgatatatcataaagggtatgctcatggccgatgaatggatcaccgtgtttatttggtcctattgcttccatgctactagtatagatcaaatacttgattcctaggtccacacaagctgccaatatagtctgtgttccataatagtttactttcatgatttcattatcggtgtattttccaaatacatccactagagcagccgtatgaataatcagatttaccccatctagcgcttctctcaccttatcaaagtcgtttatatcacattgtatatagtttataaccttaactttcgaggttattggttgtggatcttctacaatatctatgactctgatttcttgaacatcatctgcactaattaacagttttactatatacctgcctagaaatccggcaccaccagtaaccgcgtacacggccattgctgccactcataatatcagactacttattctattttactaaataatggctgtttgtataatagaccacgataatatcagaggagttatttactttgaaccagtccatggaaaagataaagttttaggatcagttattggattaaaatccggaacgtatagtttgataattcatcgttacggagatattagtcaaggatgtgattccataggcagtccagaaatatttatcggtaacatctttgtaaacagatatggtgtagcatatgtttatttagatacagatgtaaatatatctacaattattggaaaggcgttatctatttcaaaaaatgatcagagattagcgtgtggagttattggtatttcttacataaatgaaaagataatacattttcttacaattaacgagaatggcgtttgatatatcagttaatgcgtctaaaacaataaatgcattagtttacttttctactcagcaaaataaattagtcatacgtaatgaagttaatgatacacactacactgtcgaatttgatagggacaaagtagttgacacgtttatttcatataatagacataatgacaccatagagataagaggggtgcttccagaggaaactaatattggttgcgcggttaatacgccggttagtatgacttacttgtataataagtatagttttaaactgattttagcagaatatataagacacagaaatactatatccggcaatatttattcggcattgatgacactagatgatttggctattaaacagtatggagacattgatctattatttaatgagaaacttaaagtagactccgattcgggactatttgactttgtcaactttgtaaaggatatgatatgttgtgattctagaatagtagtagctctatctagtctagtatctaaacattgggaattgacaaataaaaagtataggtgtatggcattagccgaacatatatctgatagtattccaatatctgagctatctagactacgatacaatctatgtaagtatctacgcggacacactgagagcatagaggataaatttgattattttgaagacgatgattcgtctacatgttctgccgtaaccgacagggaaacggatgtataattttttttatagcgtgaaggatatgataaaaaatataattgttgtatttatcccattccaatcaccttatatgattctgtaacacaatgaaggagtctcatagatgtatagaggtcagatactggtttgataaactgtttattccacatgagtatgtttgactttatggttagacccgcatactttaacaaatcactgaaaattggagttaggtattgacctctcagaatcagttgccgttctggaacattaaatgtattttttatgatatactccaacgcatttatgtgggcatacaacaagtcattactaatggagtattccaagagttttagttgtctagtatttaacaagagaagagatttcaacagactgtttatgaactcgaatgccgcctcattgtcgcttatattgatgatgtcgaattctcccaatatcatcaccgatgagtagctcatcttgttatcgggatccaagttttctaaagatgtcattaaaccctcgatcatgaatggatttatcatcatcgtttttatgttggacatgagcttagtccgtttgtccacatctatagacgacgatttctgaattattttatatatccctctctttaactccaggaacttgtcaggatggtctactttaatatgttctcgtctaagagatgaaaatctttggatggttgcacgcgacttttctctaaaggatgacgttgcccaagatcctctcttaaatgaatccatcttatccttggacaagatggacagtctattttccttagatggtttaatatttttgttacccatgatctataaaggtagacctaatcgtctcggatgacctatatatttattttcagttttattatacgcataaattgtaaaaaatatgttaggtttacaaaaatgtctcgtggggcattaatcgtttttgaaggattggacaaatctggaaaaacaacacaatgtatgaacatcatggaatctataccggcaaacacgataaaatatcttaactttcctcagagatccactgtcactggaaagatgatagatgactatctaactcgtaaaaaaacctataatgatcatatagttaatctattattttgtgcaaatagatgggagtttgcatcttttatacaagaacaactagaacagggaattactttaatagttgatagatacgcgttctctggagtagcgtatgccgccgctaaaggcgcgtcaatgactctcagtaagagttatgaatctggattgcctaaacccgacttagttatattcttggaatctggtagcaaagaaattaatagaaacgtcggcgaggaaatttatgaagatgttacattccaacaaaaggtattacaagaatataaaaaaatgattgaagaaggagatattcattggcaaattatttcttctgaattcgaggaagatgtaaagaaggagttgattaagaatatagttatagaggctatacacacggttactggaccagtggggcaactgtggatgtaatagtgaaattacattttttataaatagatgttagtacagtgttataaatggatgaagcatattactctggcaacttggaatcagtactcggatacgtgtccgatatgcataccgaactcgcatcaatatctcaattagttattgccaagatagaaactatagataatgatatattaaacaaggacattgtaaattttatcatgtgtagatcaaacttggataatccatttatctctttcctagatactgtatatactattatagatcaagagaactatcagaccgaattgattaattcattagacgacaatgaaattatcgattgtatagttaataagtttatgagcttttataaggataacctagaaaatatagtagatgctatcattactctaaaatatataatgaataatccagattttaaaactacgtatgccgaagtactcggttccagaatagccgatatagatattaaacaagtgatacgtgagaatatactacaattgtctaatgatatccgcgaacgatatttgtgaaaaatattaaaaaaaaatactttttttattaaatgacgtcgcttcgcgaatttagaaaattatgctgtgatatatatcacgcatcaggatataaagaaaaatctaaattaattagagactttataacagatagggatgataaatatttgatcattaagctattgcttcccggattagacgatagaatttataacatgaacgataaacaaattataaaattatatagtataatatttaaacaatctcaggaagatatgctacaagatttaggatacggatatataggagacactattaggactttcttcaaagagaacacagaaatccgtccacgagataaaagcattttaactttagaagacgtggatagtttcttaactacgttatcatccgtaactaaagaatcgcatcaaataaaattattgactgatatcgcatccgtttgtacatgtaatgatttaaaatgtgtagtcatgcttattgataaagatctaaaaattaaagcgggtcctcggtacgtacttaacgctattagtcctaatgcctatgatgtgtttagaaaatctaataacttgaaagagataatagaaaatgcatctaaacaaaatctagactctatatctatttctgttatgactccaattaatcccatgttagcggaatcgtgtgattctgtcaataaggcgtttaaaaaatttccatcaggaatgtttgcggaagtcaaatacgatggtgaaagagtacaagttcataaaaataataacgagtttgccttctttagtagaaacatgaaaccagtactctctcataaagtggattatctcaaagaatacataccgaaagcatttaaaaaagctacgtctatcgtattggattctgaaattgttcttgtagacgaacataatgtaccgctcccgtttggaagtttaggaatacacaaaaagaaagaatataaaaactctaacatgtgtttgttcgtgtttgactgtttgtactttgatggattcgatatgacggacattccattgtacgaacgaagatcttttctcaaagatgttatggttgaaatacccaatagaatagtattctcagagttgacgaatattagtaacgagtctcagttaactgacgtattggatgatgcactaacgagaaaattagaaggattggtcttaaaagatattaatggagtatacgaaccgggaaagagaagatggttaaaaataaagcgagactatttgaacgagggttccatggcagattctgccgatttagtagtactaggtgcttactatggtaaaggagcaaagggtggtatcatggcagtctttctaatgggttgttacgacgatgaatccggtaaatggaagacggttaccaagtgttcaggacacgatgataatacgttaagggttttgcaagaccaattaacgatggttaaaattaacaaggatcccaaaaaaattccagagtggttggtagttaataaaatctatattcccgattttgtagtagaggatccgaaacaatctcagatatgggaaatttcaggagcagagtttacatcttccaagtcccataccgcaaatggaatatccattagatttcctagatttactaggattagagaagataaaacgtggaaagaatctactcatctaaacgatttagtaaacttgactaaatcttaatagttacatacaaactgaaaattaaaataacactatttagttggtggtcgccatggatggtgttattgtatactgtctaaacgcgttagtaaaacatggcgaggaaataaatcatataaaaaatgatttcatgattaaaccatgttgtgaaagagtttgtgaaaaagtcaagaacgttcacattggcggacaatctaaaaacaatacagtgattgcagatttgccatatatggataatgcggtatccgatgtatgcaattcactgtataaaaagaatgtatcaagaatatccagatttgctaatttgataaagatagatgacgatgacaagactcctactggtgtatataattattttaaacctaaagatgttattcctgttatcatatctataggaaaggataaagatgtctgtgaactattaatctcatcagacatatcgtgtgcatgcgtggagttaaattcatatcacgtagccattcttcccatggatgtttccttttttaccaaaggaaatgcatcattgattattctcctgtttgatttctctatcgatgcagcacctctcttaagaagtgtaaccgataataatgttattatatctagacaccagcgtctacatgacgagcttccgagttccaattggttcaagttttacataagtataaagtccgactattgttctatattatatatggttgttgatggatctgtgatgcatgcgatagctgataatagaactcacgcaattattagcaaaaatatattagacaatactacgattaacgatgagtgtagatgctgttattttgaaccacagattaggattcttgatagagatgagatgctcaatggatcatcgtgtgatatgaacagacattgtattatgatgaatttacctgatgtaggcaaatttggatctagtatgttggggaaatatgaacctgacatgattaagattgctctttcggtggctggtaatttaataagaaatcgagactacattcccgggagacgaggatatagctactacgtttacggtatagcctctagataatttttttaagcacgaaataaaaaacataattttaaaccaatctatttcatactattttgtgtgatcaccatggacataaagatagatattagtatttctggtgataaatttacggtgactactaggagggaaaatgaagaaagaaaaaaatatctacctctccaaaaagaaaaaactactgatgttatcaaacctgattatcttgagtacgatgacttgttagatagagatgagatgtttactattctagaggaatattttatgtacagaggtctattaggcctcagaataaaatatggacgactctttaacgaaattaaaaaattcgacaatgatgcggaagaacaattcggtactatagaagaactcaagcagaaacttagattaaattctgaagagggagcagataactttatagattatataaaggtacaaaaacaggatatcgtcaaacttactgtatacgattgcatatctatgataggattgtgtgcatgcgtggtagatgtttggagaaatgagaaactgttttctagatggaaatattgtttacgagctattaaactgtttattaatgatcacatgcttgataagataaaatctatactgcagaatagactagtatatgtggaaatgtcatagaaagttaaaagttaatgagagcaaaaatatataaggttgtattccatatttgttattttttctgtaatagttagaaaaatacattcgatggtctatctaccagattattatgtgttataaggtactttttctcataataaactagagtatgagtaagatagtgtttttcaaaacatataaatctaaaattgatggatgagatatacagctattaatttcgaaaatatattttaatctgataactttaaacatggatttttgatggtggtttaacgttttaaaaaaagattttgttattgtagtatatgataatattaaaagatggatataaagaatttgctgactgcatgtactattttttacattactacattggctacggcagatatacctactccgccaccaacgggtcatgtgacaagggagaatatcttgataagaggcataatcaatgttgtaatcggtgtccacctggagaatttgccaaggttagatgtaatggtaacgataacacaaaatgtgaacgctgcccacctcatacatataccacaatcccaattattctaatggatgtcatcaatgtagaaaatgcccaaccggatcatttgataaggtaaagtgtaccggaacacagaacagtaaatgttcgtgtcttcctggttggtattgtgctactgattcttcacagactgaagattgttgaaattgtgtaccaaaaaggagatgtccatgcggatactttggtggaatagatgaacaaggaaatcctatttgtaaatcgtgttgtgttggtgaatattgcgactacctacgtaattatagacttgatccatttcctccatgcaaactatctaaatgtaattaattatgattttgatgataatgttaccatacattatatcgctacttggttagtgtattattcagtatgaagacctattaataattacttatcttttgacgatcttgttataattataatataaaaatacttatggcatagtaactcataattgctgacgcgataaattcgtaataatctgttttgttcaaatttttataaggaatctacaggcataaaaataaaaatataatttataatatactcttacagcgcgccatcatgaataacagcagtgaattgattgctgttattaatggatttagaaatagtggacgattttgtgatattagtatagttattaatgatgaaaggataaacgctcataaactcatcctatctggagcctccgaatatttttccattctgttttccaataattttatcgattctaatgaatacgaagttaatctaagtcatttagattatcaaagcgttaacgatttgatcgattacatttatgggatacctttgagcctaactaacgataacgtgaaatatattctttcaaccgctgattttttacaaattggatctgctattacggagtgtgaaaattacatacttaaaaatctttgttctaaaaactgtatcgatttctacatatacgctgataaatataataacaagaaaatagaatcagcgtcgtttaacacaatattacaaaatattttgagactcatcaacgatgaaaactttaaatacttaacagaggaatcaatgataaaaattttaagcgatgatatgttaaatataaaaaatgaggattttgcaccactaattctcattaaatggttagagagtactcaacaatcatgcaccgtcgagttacttagatgcctcagaatatcattgctttccccacaagttataaaatcactttatagtcatcaactggttagttcaatctacgaatgtataacattcttaaacaatatagcattcttggatgaatcatttcctagataccatagcatcgagttgatatctatcggtataagtaattcgcatgataagatttccataaactgctacaatcataaaaaaaatacatgggaaatgatatcttcacgtagatataggtgtagtttcgcagtggccgtcctggataatattatctatatgatgggtggatatgatcagtccccgtatagaagttcaaaggttatagcgtacaatacatgtacaaattcttggatatatgatataccagagctaaaatatcctcgttctaattgtgggggactggctgatgacgaatacatttattgtataggcggcatacgcgatcaggattcatcgttgacatctagtattgataaatggaagccatcaaaaccatattggcagaagtatgctaaaatgcgcgaaccaaaatgtgatatgggggttgcgatgttaaacggattaatatatgtcatgggtggaatcgttaaaggtgacacgtgtaccgacgcactagagagtttatcagaagatggatggatgaagcatcaacgtcttccaataaaaatgtccaatatgtcgacgattgttcatgatggcaagatttatatatctggaggttacaacaatagtagtgtagttaatgtaatatcgaatctagtccttagctataatccgatatatgatgaatggaccaaattatcatcattaaacattcctagaattaatcccgctctatggtcagcgcataataaattatatgtaggaggaggaatatctgatgatgttcgaactaatacatctgaaacatacgataaagaaaaagattgttggacattggataatggtcacgtgttaccacgcaattatataatgtataaatgcgaaccgattaaacataaatatccattggaaaaaacacagtacacgaatgattttctaaagtatttggaaagttttataggtagttgatagaacaaaatacataattttgtaaaaataaatcactttttatactaatatgacacgattaccaatacttttgttactaatatcattagtatacgctacaccttttcctcagacatctaaaaaaataggtgatgatgcaactctatcatgtaatcgaaataatacaaatgactacgttgttatgagtgcttggtataaggagcccaattccattattcttttagctgctaaaagcgacgtcttgtattttgataattataccaaggataaaatatcttacgactctccatacgatgatctagttacaactatcacaattaaatcattgactgctagagatgccggtacttatgtatgtgcattctttatgacatcgcctacaaatgacactgataaagtagattatgaagaatactccacagagttgattgtaaatacagatagtgaatcgactatagacataatactatctggatctacacattcaccggaaactagttctgagaaacctgattatatagataattctaattgctcgtcggtattcgaaatctaagcttaaaaattgaaattttattttttttttttggaatataaataagctcgaagtcgaccaccatggtgggtgaggatagcgtgctgatcaccgagaacatgcacatgaaactgtacatggagggcaccgtgaacgaccaccacttcaagtgcacatccgagggcgaaggcaagccctacgagggcacccagaccatgaagatcaaggtggtcgagggcggccctctccccttcgccttcgacatcctggctaccagcttcatgtacggcagcaaaacctttatcaaccacacccagggcatccccgacttctttaagcagtccttccctgagggcttcacatgggagaggatcaccacatacgaagacgggggcgtgctgaccgctacccaggacaccagcctccagaacggctgcctcatctacaacgtcaagatcaacggggtgaacttcccatccaacggccctgtgatgcagaagaaaacactcggctgggaggccagcaccgagatgctgtaccccgctgacagcggcctgagaggccatagccagatggccctgaagctcgtgggcgggggctacctgcactgctccctcaagaccacatacagatccaagaaacccgctaagaacctcaagatgcccggcttctacttcgtggacaggagactggaaagaatcaaggaggccgacaaagagacctacgtcgagcagcacgagatggctgtggccaggtactgcgacctgcctagcaaactggggcacagctgattaattaatttttatcgatctaattcaacaatgtctggagagctcggtaccaagcttcgcaggatcccgactccggaaccaattactgataaagaagatcatacagttacagacactgtctcatacactacagtaagtacatcatctggaattgtcactactaaatcaaccaccgatgatacgtacaatgataatgatacagtaccaccaactactgtaggcggtagtacaacctctattagcaattataaaaccaaggactttgtagaaatatttggtattaccgcattaattatattgtcggccgtggcaatattctgtattacgtattatatatgtaataaacgttcacgtaaatacaaaacagagaacaaagtctagatttttgacttacataaatgtctgggatagtaaaatctatcatattgagcggaccatctggtttaggaaagacagccatagccaaaagactatgggaatatatttggatttgtggtgtcccataccactagatttcctcgtcctatggaacgagaaggtgttgattaccattacgttaacagagaggccatctggaagggaatagccgccggaaactttctagaacatactgagtttttaggaaatatttacggaacttctaaaacagctgtgaatacagcggctattaataatcgtatttgtgtgatggatctaaacatcgacggtgttagaagtcttaaaaatacgtacctaatgccttactcggtgtatataagacctacctctcttaaaatggttgagaccaagcttcgttgtagaaacactgaagctaacgatgagattcatcgtcgcgtgatattggcaaaaacggatatggatgaggccaacgaagcaggtctattcgacactattatcattgaagatgatgtgaatttagcatatagtaagttaattcagatactacaggaccgtattagaatgtattttaacactaattagagacttaagacttaaaacttgataattaataatataactcgtttttatatgtggctatttcaacgtctaatgtattagttaaatattaaaacttaccacgtaaaacttaaaatttaaaatgatatttcattgacagatagatcacacattatgaactttcaaggacttgtgttaactgacaattgcaaaaatcaatgggtcgttggaccattaataggaaaaggtggattcggtagtatttatactactaatgacaataattatgtagtaaaaatagagcccaaagctaacggatcattatttaccgaacaggcattttatactagagtacttaaaccatccgttatcgaagaatggaaaaaatctcacaatataaagcacgtaggtcttatcacgtgcaaggcatttggtctatacaaatccattaatgtggaatatcgattcttggtaattaatagattaggtgcagatctagatgcggtgatcagagccaataataatagattaccaaaaaggtcggtgatgttgatcggaatcgaaatcttaaataccatacaatttatgcacgagcaaggatattctcacggagatattaaagcgagtaatatagtcttggatcaaatagataagaataaattatatctagtggattacggattggtttctaaattcatgtctaatggagaacatgttccatttataagaaatccaaataaaatggataacggtactctagaatttacacctatagattcgcataaaggatacgttgtatctagacgtggagatctagaaacacttggatattgtatgattagatggttgggaggtatcttgccatggactaagatatctgaaacaaagaattgtgcattagtaagtgccacaaaacagaaatatgttaacaatactgcgactttgttaatgaccagtttgcaatatgcacctagagaattgctgcaatatattaccatggtaaactctttgacatattttgaggaacccaattatgacgagtttcggcacatattaatgcagggtgtatattattaagtgtggtgtttggtcgatgtaaaatttttgtcgataaaaattaaaaaataacttaatttattattgatctcgtgtgtacaaccgaaatcatggcgatgttttacgcacacgctctcggtgggtacgacgagaatcttcatgcctttcctggaatatcatcgactgttgccaatgatgtcaggaaatattctgttgtgtcagtttataataacaagtatgacattgtaaaagacaaatatatgtggtgttacagtcaggtgaacaagagatatattggagcactgctgcctatgtttgagtgcaatgaatatctacaaattggagatccgatccatgatcaagaaggaaatcaaatctctatcatcacatatcgccacaaaaactactatgctctaagcggaatcgggtacgagagtctagacttgtgtttggaaggagtagggattcatcatcacgtacttgaaacaggaaacgctgtatatggaaaagttcaacatgattattctactatcaaagagaaggccaaagaaatgaatgcacttagtccaggacctatcattgattaccacgtctggataggagattgtatctgtcaagttactgctgtggacgtacatggaaaggaaattatgagaatgagattcaaaaagggtgcggtgcttccgatcccaaatctggtaaaagttaaacttggggagaatgatacagaaaatctttcttctactatatcggcggcaccatcgaggtaaccacctctctggaagacagcgtgaataatgtactcatgaaacgtttggaaactatacgccatatgtggtctgtcgtatatgatcattttgatattgtgaatggtaaagaatgctgttatgtgcatacgcatttgtctaatcaaaatcttataccgagtactgtaaaaacaaatttgtacatgaagactatgggatcatgcattcaaatggattccatggaagctctagagtatcttagcgaactgaaggaatcaggtggatggagtcccagaccagaaatgcaggaatttgaatatccagatggagtggaagacactgaatcaattgagagattggtagaggagttcttcaatagatcagaacttcaggctggtgaatcagtcaaatttggtaattctattaatgttaaacatacatctgtttcagctaagcaactaagaacacgtatacggcagcagcttcctttatactctcatcttttaccaacacaaagggtggatatttgttcattggagttgataataatacacacaaagtaattggattcacggtgggtcatgactacctcagactggtagagaatgatatagaaaagcatatcaaaagacttcgtgttgtgcatttctgtgagaagaaagaggacatcaagtacacgtgtcgattcatcaaggtatataaacctggggatgaggctacctcgacatacgtgtgcgctatcaaagtggaaagatgctgttgtgctgtgtttgcagattggccagaatcatggtatatggatactaatggtatcaagaagtattctccagatgaatgggtgtcacatataaaattttaattaatgtaatagagaacaaataataaggttgtaatatcatatagacaataactaacaattaattagtaactgttatctcttttttaactaaccaactaactatatacctattaatacatcgtaattatagttcttaacatctattaatcattaattcgcttctttaattttttataaactaacattgttaattgaaaagggataacatgttacagaatataaattatatatggatttttttaaaaaggaaatacttgactggagtatatatttatctcttcattatatagcacgcgtgttttccaatttttccacatcccatataatacaggattataatctcgttcgaacatacgagaaagtggataaaacaatagttgattttttatctaggttgccaaatttattccatattttagaatatggggaaaatattctacatatttattctatggatgatgctaatacgaatattataattttttttctagatagagtattaaatattaataagaacgggtcatttatacacaatctcaggttatcatcatccattaatataaaagaatatgtatatcaattagttaataatgatcatccagataataggataagactaatgcttgaaaatggacgtagaacaagacattttttgtcctatatatcagatacagttaatatctatatatgtattttaataaatcatggattttatatagatgccgaagacagttacggttgtacattattacatagatgtatatatcactataagaaatcagaatcagaatcatacaatgaattaattaagatattgttaaataatggatcagatgtagataaaaaagatacgtacggaaacacaccttttatcctattatgtaaacacgatatcaacaacgtggaattgtttgagatatgtttagagaatgctaatatagactctgtagactttaatagatatacacctcttcattatgtctcatgtcgtaataaatatgattttgtaaagttattaatttctaaaggagcaaatgttaatgcgcgtaatagattcggaactactccattttattgtggaattatacacggtatctcgcttataaaactatatttggaatcagacacagagttagaaatagataatgaacatatagttcgtcatttaataatttttgatgctgttgaatctttagattatctattatccagaggagttattgatattaactatcgtactatatacaacgaaacatctatttacgacgctgtcagttataatgcgtataatacgttggtctatctattaaacagaaatggtgattttgagacgattactactagtggatgtacatgtatttcggaagcagtcgcaaacaacaacaaaataataatggaagtactattgtctaaacgaccatctttgaaaattatgatacagtctatgatagcaattactaaacataaacagcataatgcagatttattgaaaatgtgtataaaatatactgcgtgtatgaccgattatgatactcttatagatgtacagtcgctacagcaatataaatggtatattttaaaatgtttcgatgaaatagatatcatgaagagatgttatataaaaaataaaactgtattccaattagttttttgtatcaaagacattaatactttaatgagatacggtaaacatccttctttcgtgaaatgcactagtctcgacgtatacggaagtcgtgtacgtaatatcatagcatctattagatatcgtcagagattaattagtctattatccaagaagctggatcctggagataaatggtcgtgttttcctaacgaaataaaatataaaatattggaaaactttaacgataacgaactatccacatatctaaaaatcttataaacactattaaaatataaaatctaagtaggataaaatcacactacatcattgtttccttttagtgctcgacagtgtatactatttttaacactcataaataaaaatgaaaacgatttccgttgttacgttgttatgcgtactacctgctgttgtttattcaacatgtactgtacccactatgaataacgctaaattaacgtctaccgaaacatcgtttaatgataaacagaaagttacgtttacatgtgatcagggatatcattcttcggatccaaatgctgtctgcgaaacagataaatggaaatacgaaaatccatgcaaaaaaatgtgcacagtttctgattacatctctgaattatataataaaccgctatacgaagtgaattccaccatgacactaagttgcaacggcgaaacaaaatattttcgttgcgaagaaaaaaatggaaatacttcttggaatgatactgttacgtgtcctaatgcggaatgtcaacctcttcaattagaacacggatcgtgtcaaccagttaaagaaaaatactcatttggggaatatatgactatcaactgtgatgttggatatgaggttattggtgcttcgtacataagttgtacagctaattcttggaatgttattccatcatgtcaacaaaaatgtgatatgccgtctctatctaatggattaatttccggatctacattttctatcggtggcgttatacatcttagttgtaaaagtggttttacactaacggggtctccatcatccacatgtatcgacggtaaatggaatcccgtactcccaatatgtgtacgaactaacgaagaatttgatccagtggatgatggtcccgacgatgagacagatttgagcaaactctcgaaagacgttgtacaatatgaacaagaaatagaatcgttagaagcaacttatcatataatcatagtggcgttaacaattatgggcgtcatatttttaatctccgttatagtattagtttgttcctgtgacaaaaataatgaccaatataagttccataaattgctaccgtaaatataaatccgttaaaataatgaataattaataacgaacaagtatcaaaagattaaagaattatagctagaatcaattgagatgtcttcttcagtggatgttgatatctacgatgccgttagagcatttttactcaggcactattataacaagagatttattgtgtatggaagaagtaacgccatattacataatatatacaggctatttacaagatgcgccgttataccgttcgatgatatagtacgtactatgccaaatgaatcacgtgttaaacaatgggtgatggatacacttaatggtataatgatgaatgaacgcgatgtttctgtaagcgttggcaccggaatactattcatggaaatgtttttcgattacaataaaaatagtatcaacaatcaactaatgtatgatataattaatagcgtatctataattctagctaatgagagatatagaagcgcttttaacgacgatggtatatacatccgtagaaatatgattaacaagttgtacggatacgcatctctaactactattggcacgatcgctggaggtgtttgttattatctgttgatgcatctagttagtttgtataaataattatttcaatatactagttaaaattttaagattttaaatgtataaaaaactaataacgtttttatttgtaataggtgcattagcatcctattcgaataatgagtacactccgtttaataaactgagtgtaaaactctatatagatggagtagataatatagaaaattcatatactgatgataataatgaattggtgttaaattttaaagagtacacaatttctattattacagagtcatgcgacgtcggatttgattccatagatatagatgttataaacgactataaaattattgatatgtataccattgactcgtctactattcaacgcagaggtcacacgtgtagaatatctaccaaattatcatgccattatgataagtacccttatattcacaaatatgatggtgatgagcgacaatattctattactgcagagggaaaatgctataaaggaataaaatatgaaataagtatgatcaacgatgatactctattgagaaaacatactcttaaaattggatctacttatatatttgatcgtcatggacatagtaatacatattattcaaaatatgatttttaaaaatttaaaatatattatcacttcagtgacagtagtcaaataacaaacaacaccatgagatatattataattctcgcagttttgttcattaatagtatacacgctaaaataactagttataagtttgaatccgtcaattttgattccaaaattgaatggactggggatggtctatacaatatatcccttaaaaattatggcatcaagacgtggcaaacaatgtatacaaatgtaccagaaggaacatacgacatatccgcatttccaaagaatgatttcgtatctttctgggttaaatttgaacaaggcgattataaagtggaagagtattgtacgggactatgcgtcgaagtaaaaattggaccaccgactgtaacattgactgaatacgacgaccatatcaatttgtacatcgagcatccgtatgctactagaggtagcaaaaagattcctatttacaaacgcggtgacatgtgtgatatctacttgttgtatacggctaacttcacattcggagattctaaagaaccagtaccatatgatatcgatgactacgattgcacgtctacaggttgcagcatagactttgtcacaacagaaaaagtgtgcgtgacagcacagggagccacagaagggtttctcgaaaaaattactccatggagttcgaaagtatgtctgacacctaaaaagagtgtatatacatgcgcaattagatccaaagaagatgttcccaatttcaaggacaaaatggccagagttatcaagagaaaatttaataaacagtctcaatcttatttaactaaatttctcggtagcacatcaaatgatgttaccacttttcttagcatgcttaacttgactaaatattcataactaatttttattaatgatacaaaaacgaaataaaactgcatattatacactggttaacgcccttataggctctaaccattttcaagatgaggtccctgattatagtccttctgttcccctctatcatctactccatgtctattagacaatgtgagaagactgaagaggaaacatggggattgaaaatagggttgtgtataattgccaaagatttctatcccgaaagaactgattgcagtgttcatctcccaactgcaagtgaaggattgataactgaaggcaatggattcagggatatacgaaacaccgataaattataaaaaaagcaatgtgtccgctgtttccgttaataatactattttcgtaactggcggattattcataaataactctaatagcacgatcgtggttaacaatatggaaaaacttgacatttataaagacaaacaatggtcgattatagaaatgcctatggctagggtatatcacggcatcgactcgacatttggaatgttatattttgccggaggtctatccgttaccgaacaatatggtaatttagagaaaaacaacgagatatcttgttacaatcctagaacgaataagtggtttgatatttcatatactatttataagatatccatatcatcattgtgtaaactaaataacgtcttctatgtatttagtaaggacattggatatgtggaaaagtatgatggtgcatggaagttagtacatgatcgtctccccgctataaaggcattatcaacttctccttattgattgaaaatgaaaatataaatagtttttatgtatagcagtattaccctatagttttattgcttactactaacatggatacagatgttacaaatgtagaagatatcataaatgaaatagatagagagaaagaagaaatactaaaaaatgtagaaattgaaaataataaaaacattaacaagaatcatccaagtggatatattagagaagcactcgttattaataccagtagtaatagtgattccattgataaagaagttatagaatgtatctgtcacgatgtaggaatatagatcatatctactaatttttataatcgatacaaaacataaaaaacaactcgttattacatagcaggcatggaatccttcaagtattgttttgataacgatggcaagaaatggattatcggaaatactttatattctggtaattcaatactatataaggtcagaaaaaatttcactagttcgttctacaattacgtaatgaagatagatcacaaatcacacaagccattgttgtctgaaatacgattctatatatctgtattggatcctttgactatcgacaactggacacgggaacgtggtataaagtatttggctattccagatctgtatggaattggagaaaccgatgattatatgttcttcgttataaagaatttgggaagagtattcgccccaaaggatactgaatcagtcttcgaagcatgcgtcactatgataaacacgttagagtttatacactctcaaggatttacccatggaaaaatagaaccgaggaatatactgattagaaataaacgtctttcactaattgactattctagaactaacaaactatacaagagtggaaactcacatatagattacaacgaggacatgataacttcaggaaatatcaattatatgtgtgtagacaatcatcttggagcaacagtttcaagacgaggagatttagaaatgttgggatattgcatgatagaatggttcggtggcaaacttccatggaaaaacgaaagtagtataaaagtaataaaacaaaaaaaagaatataaaaaatttatagctactttctttgaggactgttttcctgaaggaaatgaacctctggaattagttagatatatagaattagtatacacgttagattattctcaaactcctaattatgacagactacgtaaactgtttatacaagattgaaattatattcttttttttatagagtgtggtagtgttacggatatttaatattagactatctctatcgcgctacacgaccaatatcgattactatggatatcttcagggaaatcgcatcttctatgaaaggagagaatgtattcatttctccagcgtcaatctcgtcagtattgacaatactgtattatggagctaatggatccactgctgaacagctatcaaaatatgtagaaaaggaggagaacatggataaggttagcgctcaaaatatctcattcaaatccataaataaagtatatgggcgatattctgccgtgtttaaagattcctttttgagaaaaattggcgataagtttcaaactgttgacttcactgattgtcgcactatagatgcaatcaacaagtgtgtagatatctttactgaggggaaaatcaatccactattggatgaaccattgtctcctgatacctgtctcctagcaattagtgccgtatactttaaagcaaaatggttgacgccattcgaaaaggaatttaccagtgattatcccttttacgtatctccgacggaaatggtagatgtaagtatgatgtctatgtacggcaaggcatttaatcacgcatctgtaaaggaatcattcggcaacttttcaatcatagaactgccatatgttggagatactagtatgatggtcattcttccagacaagattgatggattagaatccatagaacaaaatctaacagatacaaattttaagaaatggtgtaactctctggaagctacgtttatcgatgttcacattcccaagtttaaggtaacaggctcgtataatctggtggatactctagtaaagtcaggactgacagaggtgttcggttcaactggagattatagcaatatgtgtaattcagatgtgagtgtcgacgctatgatccacaaaacgtatatagatgtcaatgaagagtatacagaagcagctgcagcaacttgtgcactggtgtcagactgtgcatcaacaattacaaatgagttctgtgtagatcatccgttcatctatgtgattaggcatgttgatggaaaaattcttttcgttggtagatattgctctccgacaactaattgttaaccattttttttaaaaaatagaaaaaacatgtggtattagtgcaggtcgttattcttccaattgcaattggtaagatgacggccaactttagtacccacgtcttttcaccacagcactgtggatgtgacagactgaccagtattgatgacgtcagacaatgtttgactgaatatatttattggtcgtcctatgcataccgcaacaggcaatgcgctggacaattgtattccacactcctctcttttagagatgatgcggaattagtgttcatcgacattcgcgagctggtaaaaaatatgccgtgggatgatgtcaaagattgtgcagaaatcatccgttgttatataccggatgagcaaaaaaccatcagagagatttcggccatcatcggactttgtgcatatgctgctacttactggggaggtgaagaccatcccactagtaacagtctgaacgcattgtttgtgatgcttgagatgctcaattacgtggattataacatcatattccggcgtatgaattgatgagttgtacatcttgacattttcttctttcttctcttctccctttcccagaaacaaactttttttacccactataaaataaaatgagtatactacctgttatatttctttctatatttttttattcttcattcgttcagacttttaacgcgcctgaatgtatcgacaaagggcaatattttgcatcattcatggagttagaaaacgagccagtaatcttaccatgtcctcaaataaatacgctatcatccggatataatatattagatattttatgggaaaaacgaggagcggataatgatagaattataccgatagataatggtagcaatatgctaattctgaacccgacacaatcagactctggtatttatatatgcattaccacgaacgaaacctactgtgacatgatgtcgttaaatttgacaatcgtgtctgtctcagaatcaaatatagatcttatctcgtatccacaaatagtaaatgagagatctactggcgaaatggtatgtcccaatattaatgcatttattgctagtaacgtaaacgcagatattatatggagcgggcatcgacgccttagaaataagagacttaaacaacggacacctggaattattaccatagaagatgttagaaaaaatgatgctggttattatacatgtgttttagaatatatatacggtggcaaaacatataacgtaaccagaattgtaaaattagaggtacgggataaaataataccttctactatgcaattaccagatggcattgtaacttcaataggtagtaatttgactattgcatgcagagtatcgttgagacctcccacaacggatgcagacgtcttttggataagtaatggtatgtattacgaagaagatgatggggacggaaacggtagaataagtgtagcaaataaaatctatatgaccgataagagacgtgttattacatcccggttaaacattaatcctgtcaaggaagaagatgctacaacgtttacgtgtatggcgtttactattcctagcatcagtaaaacagttactgttagtataacgtgaatgtatgttgttacatttccatgtcaattgagtttataagaatttttatacattatcttccaacaagcaattgacgaacgtattgctatgattaactcccacgatactatgcatattattaatcattaacttgcagactatacctagagctattttgacatactcgtgttcttgtgtaattgcagtatctatattattaaagtacgtaaatctagctatagttttattatttaattttagataatataccgtctccttatttttaaaaattgccacatcctttattaaatcatgaatgggaatttctatgtcatagttaatatattgtgaacaacaagagcagatatctataggaaagggtggaatgcgatacattgatctatgtagttttaaaacacacgcaaactttgaagaatttatataaatcattccatcgatacatccttctatgttgagatgtatatatccaggaattcgtttattaatatcgggaaatgtataaactaaaacattgcccggaagcggagcttctaccggagttatatcagtttttaacttacaaaatgtaaccaatacctttgcatgacttgttttgttcggcaacgttagtttaaacttgacgaatggattaattacaatagcatgatccgcgcatctattaagtttttttactttaacgcccttgtatgtttttacagagactttatctaaatttctagtgcttgtatgtgttataaatataacgggatatagaactgaatcacctaccttagatacccaattacattttatcagatccagataataaacaaattttgtcgccctaactaattctatattgttatatattttacaattggttatgatatcatgtaataacttggaatctaacgcacatcgtcgtacgtttatacaattgtgatttagtgtagtatatctacacatgtatttttccgcgctatagtattctggactagtgataaaactatcgttatatctgtcttcaatgaactcatcgagatattgctctctgtcatattcatacacctgcataaactttctagacatcttacaatccgtgttattttaggatcatatttacatatttacgggtatatcaaagatgttagattagttaatgggaatcgtctataataatgaatattaaacaattatatgaggacttttaccacaaagcatcataaaaatgagtcgtcgtctgatttatgttttaaatatcaaccgcgaatcaactcataaaatacaagagaatgaaatatatacatattttagtcattgcaatatagaccatacttctacagaacttgattttgtagttaaaaactatgatctaaacagacgacaacctgtaactgggtatactgcactacactgctatttgtataataattactttacaaacgatgtactgaagatattattaaatcatggagtggatgtaacgatgaaaaccagtagcggacgtatgcctgtttatatattgcttactagatgttgcaatatttcacatgatgtagtgatagatatgatagacaaagataaaaaccacttattacatagagactattccaacctattactagagtatataaaatctcgttacatgttattaaaggaagaggatatcgatgagaacatagtatccactttattagataagggaatcgatcctaactttaaacaagacggatatacagcgttacattattattatttgtgtctcgcacacgtttataaaccaggtgagtgtagaaaaccgataacgataaaaaaggccaagcgaattatttctttgtttatacaacatggagctaatctaaacgcgttagataattgtggtaatacaccattccatttgtatcttagtattgaaatgtgtaataatattcatatgactaaaatgctgttgacttttaatccgaatttcgaaatatgtaataatcatggattaacgcctatactatgttatataacttccgactacatacaacacgatattcttgttatgttaatacatcactatgaaacaaatgttggagaaatgccgatagatgagcgtcgtataatcgtattcgagtttatcaaaacatattctacacgtcctgcagattcgataacttatttgatgaataggtttaaaaatatagatatttatacccgctatgaaggaaagacattattacacgtagcatgtgaatataataatacacacgtaatagattatcttatacgtatcaacggagatataaatgcgttaaccgacaataacaaacacgctacacaactcattatagataacaaagaaaattccccatataccattaattgtttactgtatatacttagatatattgtagataagaatgtgataagatcgttggtggatcaacttccatctctacctatcttcgatataaaatcatttgagaaattcatatcctactgtatacttttagatgacacattttacaatagacacgttaggaatcgcgattctaaaacgtatcgatacgcattttcaaaatacatgtcgtttgataaatacgatggtataataactaaatgtcataaagaaacaatattgctcaaactatccactgttctagacactacactatatgcagttttaagatgccataattcgaaaaagttaagaagatacctcaccgagttaaaaaaatataataacgataagtcctttaaaatatattctaatattatgaatgagagataccttaatgtatattataaagatatgtacgtgtcaaaggtatatgataaactatttcctgttttcacagataaaaattgtctactaacattactaccttcagaaattatatacgaaatattatacatgctgacaattaacgatctttataatatatcgtatccacctaccaaagtatagttgtatttttctcatgcgatgtgtgtaaaaaaactgatattatataaatattttagtgccgtataataaagatgacgatgaaaatgatggtacatatatatttcgtatcattattgttattgctattccacagttacgccatagacatcgaaaatgaaatcacagaattcttcaataaaatgagagatactctaccagctaaagactctaaatggttgaatccagcatgtatgttcggaggcacaatgaatgatatagccgctctaggagagccattcagcgcaaagtgtcctcctattgaagacagtcttttatcgcacagatataaagactatgtggttaaatgggaaaggctagaaaaaaatagacggcgacaggtttctaataaacgtgttaaacatggtgatttatggatagccaactatacatctaaattcagtaaccgtaggtatttgtgcaccgtaactacaaagaatggtgactgtgttcagggtatagttagatctcatattagaaaacctccttcatgcattccaaaaacatatgaactaggtactcatgataagtatggcatagacttatactgtggaattctttacgcaaaacattataataatataacttggtataaagataataaggaaattaatatcgacgacattaagtattcacaaacgggaaaggaattaattattcataatccagagttagaagatagcggaagatacgactgttacgttcattacgacgacgttagaatcaagaatgatatcgtagtatcaagatgtaaaatacttacggttataccgtcacaagaccacaggtttaaactaatactagatccaaaaatcaacgtaacgataggagaacctgccaatataacatgcactgctgtgtcaacgtcattattgattgacgatgtactgattgaatgggaaaatccatccggatggcttataggattcgattttgatgtatactctgttttaactagtagaggcggtattaccgaggcgaccttgtactttgaaaatgttactgaagaatatataggtaatacatataaatgtcgtggacacaactattattttgaaaaaacccttacaactacagtagtattggagtaaatatacaatgcatttttatatacattactgaataattattattattatttatatcgtatttgtgctataacgcgactatctaggtatttgtatctcaccgatagagaacatataaatgtagactctattaaacagttgtgtaaaatatcagatcctaatgcatgttatagatgtggatgtacggctttacatgagtacttttataattatagatcagtcaacggaaaatacaagtatagatacaacggttactatcaatattatttatctagcgattatgaaaattataatgaatattattatgatgattatgatagaactggtatgaacagtgagagtgataatatatcaatcaaaacagaatatgaattctatgatgaaacacaagatcaaagtacacaactagtaggttacgacattaaactcaaaaccaatgaggatgattttatggctatgatagatcagtgggtgtccatgattatatagatgaatcaattaataaagtagtatatggaagagagtctcacgtaagatggcgggatatatggcaagaacataatgatggcgtatacagtataggaaaggagtgcatagataatatatacgaagacaaccataccgtagacgaattctacaagatagacagcgtatcagatgtagatgacgcggaacacatatctccgataactaatgatgtatctacacaaacatgggaaaagaaatcagagttagatagatacatggaaatgtatcctcgtcatagatatagtaagcattctgtctttaagggattttctgacaaagttagaaaaaatgatttagacatgaatgtggtaaaagaattactttctaacggtgcatctctaacaattaaggatagcagtaataaggatccaataaccgtttattttcgaagaacgataatgaatttagaaatgattgatgaacgaaagtatatagtacactcctatctaaaaaattataaaaatttcgattatccatttttcaggaagttagttttgactaataaacattgtctcaacaattattataatataagcgacagcaaatatggaacaccgctacatatattggcgtctaataaaaaattaataactcctaattacatgaagttattagtgtataacggaaatgatataaacgcacgaggtgaagatacacaaatgcgaactccattacacaaatatttgtgtaaatttgtatatcataatattgaatatggtatccgatactataatgaaaagattatagacgcatttatagagttaggagccgatctaactattccaaatgacgatggaatgataccagtagtttactgtatacactcaaatgccgaatatggttataacaatattactaacataaagataatacgtaaactacttaatcttagtagacgtgcgtcacataatctatttagagatcgagtcatgcacgattatataagtaatacatatattgatcttgagtgtttagatattattagatcgttggatggattcgatatcaatggttactttgaaggacgtacaccacttcattgcgctatacaacataacttcactcagattgctaagtacttattagatcgaggagctgatatagtcgtacccaacacattgattatacatcagtacatacagtaaatagcatagatatggaggaggatacaaatatttcaaataaagttataaggtacaacactgtcaataatatatgggaaacattacctaacttctggactggaactataaatccaggcgtggtctcgcataaagatgatatatatgttgtatgcgacatcaaagatgaaaaaaatgttaaaacttgtatatttagatataacacgaatacgtataacggatgggaattggtcacgacgacagaaagcagattatcagctctgcatactattctttataacaataccataatgatgttacattgttatgaatcgtatatgttacaagatacatttaatgtgtacactcgcgaatggaatcatatgtgtcatcaacattcgaatagttatatcatgtacaatatactacccatctactaaatataatagaataaaataaatgagtatgatcattttagataacgattgattttatcattaccgcttcattcttatattctttgcttacggaacctatatttagaaacatctactaacgattttttatgcttgcattattaatggtatgtaatatgattgattgtgtacgcaataccaatttgttaagtatgaatacggggtacaaacataaactgaagtttaacattatttatttatgatatatatcgttattgtttggtctataccatggatatctttaaagaactaatcttaaaacacacggatgaaaatgttttgatttctccagtttctattttatctactttatctattctaaatcatggagcagctggttctacagctgaacaactatcaaaatatatagagaatatgaatgagaatacacccgatgacaataatgacatggacgtagatattccgtattgtgcgacactagctaccgcaaataaaatatacggtagcgatagtatcgagttccacgcctccttcctacaaaaaataaaagacgattttcaaactgtaaactttaataatgctaaccaaacaaaggaactaatcaacgaatgggttaagacaatgacaaatggtaaaattaattccttattgactagtccgctatccattaatactcgtatgacagttgttagcgccgtccattttaaagcaatgtggaaatatccattttctaaacatcttacatatacagacaagttttatatttctaagaatatagttaccagtgttgatatgatggtgagcactgagaataacttgcaatatgtacatattaatgaattattcggaggattctctattatcgatattccatacgagggaaactctagtatggtaattatactaccggacgacatagaaggtatatataacatagaaaaaaatataacagatgaaaaatttaaaaaatggtgtggtatgttatctactaaaagtatagacttgtatatgccaaagtttaaagtggaaatgacagaaccgtataatctggtaccgattttagaaaatttaggacttactaatatattcggatattatgcagattttagcaagatgtgtaatgaaactatcactgtagaaaaatttctacatacgacgtttatagatgttaatgaggagtatacagaagcatcggccgttacaggagtatttatgactaacttttcgatggtatatcgtacgaaggtctacataaaccatccattcatgtacatgattaaagacaacacaggacgtatactttttatagggaaatactgctatccgcaataaatataaacaaatagacttttatcacgtttatctatgtctaaatattacaaatagtaatagtataaactaaagctgataatacttaaaaaaataataatatcatttacaattaatagtataaactaaaaattaaacaaatcgttattataagtaatatcaaaatgatgatatacggattaatagcgtgtcttatattcgtgacttcatccatcgctagtccactttatattcccgttattccacccatttcggaagataaatcgttcaatagtgtagaggtattagtttccttgtttagagatgaccaaaaagactatacggtaacttctcagttcaataactacactatcgataccaaagactggactatcggcgtactatccacacctgatggtttggatataccattgactaatataacttattggtcacggtttactataggtcgtgcattgttcaaatcagagtctgaggatattttccaaaagaaaatgagtattctaggtgtttctatagaatgtaagaagtcgtcgacattacttacttttttgaccgtgcgtaaaatgactcgagtatttaataaatttccagatatggcttattatcgaggagactgtttaaaagccgtttatgtaacaatgacttataaaaatactaaaactggagagactgattacacgtacctctctaatggggggttgcctgcatactatcgtaatggggtcgatggttgattattgattagtatattccttattctttttattcacacaaaaagaacatttttataaacatgaaaccactgtctaaatgtaattatgatcttgatttatagatgaagatcagcctttagaggattttaaccagtatgtttaatatgaaaaaaataaacataacatattttgagattaagcgctattgtgcaagattatattagaatcaaattaatctttcatacgagaaaaataacgacatacgtcgtcaacaaattaaactttttatttattagttaactagcttatagaacttgctcattgttatgtttctaaaacgggtacgacatataggacaattatccgacgcaccggtttctcttcgtgttttatgccatatattgatgcatgttatgcaaaatatatgagtacacgaatccaataaaccaaagtatctatcgttttgagtaaacaacttcatagcaaattccacattctttttctttacttactctatacacgtcctcgtatttatccagtattttgatgatatccaactcagaaatggttgttgtattattgggtgtattgggagtataggtattattagctatgtaccaatttaccaaccctcttaatattgattgaacaatcacatcggttatccaatcaataaccacattaataactaaattgtagtgtatatatagaccatatatgtttctatttttttgacagttacgtatagtttcagtaagttttgattgttgtattcctgtatctctagataagttagtcatatagtcccttccggcgatacgttttttccaagcccgaaattgattagccaaatgtgtatttatttttgtgatattgatataatatgtaatgttattaatatttcggataatgcatactgttagtcttatatcatttggttcatctatgtattgtaatattgttacatgatctatagatgatgtattgattttggcaggatcgaattccatatccgcgactaaacagtgaaaaaaatgtaaatactttttaaattttaaattagtaaaacttttttttattttttatgattccaaaaatactgaatacaaagtcctaaattataaatatggagatcatactaccacaacttattattatgcatactcagccggtgtaatagatagatatatataattctattacaccggcagacaattaccgatcggtatttgtcgttaccaacataccgtataatatgtaatatacaattccataacccattgacagttgttatacatcaaaattgcaattcttttgattacgatgttataagaatgtagttaattgatgtatgatgttaatgtgtcctctttcctcttataacatcgtaatcaaaaacttttttataatatatacctaataatgtgtcttaatagttctcgtgattcgtcaaacaatcattcttataaaatataataaagcaacgtaaaacacataaaaataagcgtaactaataagacaatggatatttacgacgataaaggtctacagactattaaactgtttaataatgaatttgattgtataaggaatgacatcagagaattatttaaacatgtaactgattccgatagtatacaacttccgatggaagacaattctgatattatagaaaatatcagaaaaatactatatagacgattaaaaaatgtagaatgtgttgacatcgatagtacaataacttttatgaaatacgatccaaatgatgataataagcgtacgtgttctaattgggtacccttaactaataactatatggaatattgtctagtaatatatttggaaacaccgatatgtggaggcaaaataaaattataccaccctacaggaaatataaagtcggataaggatattatgtttgcaaagactctagactttaaatcaaagaaagtgttaactggacgtaaaacaattgccgttctagacatatccgtttcatataatagatcaatgactactattcactacaacgacgacgttgatatagatatacatactgataaaaatggaaaagagttatgttattgttatataacaatagatgatcattacttggttgatgtggaaactataggagttatagtcaatagatctggaaaatgtctgttagtaaataaccatctaggtataggtatcgttaaagataaacgtataagcgatagttttggagatgtatgtatggatacaatatttgacttttctgaagcacgagagttattttcattaactaatgatgataacaggaatatagcatgggacactgataaactagacgatgatacagatatatggactcccgtcacagaagatgattacaaatttctttctagactagtattgtatgcaaaatctcaatcggatactgtattcgactattatgttcttactggtgatacggaaccacccactgtattcattttcaaggtaactagattttactttaatatgccgaaataaaaaatttttgtataatatctagaggtagaggtattgtttagataaatacaaataacatagatacatcgcatacttagcatttttataaatatacataagacatacactttatacattttttttgtaaaaatactcataaaaaaatttataaaaattatggcacaaccatatcttgtataggtagtttagttcgtcgagtgaacctataaacagataatagacaacacgtaataataataatgcctactaatacaagcataataccgggagatgggatatatgacgttgtagtgtttgggttttctgaacgttgatagtctactaatactacatgctgacatctaatgcctgtataaccatgagagcatctacaatacataccgtcaatatctctagcgtggatacagtcaccgtgtaaacaatatccatctccctctggaccgcataatctgatagctggaatatctgttgtagcgtttgtaatttctggcgatgtcgtttcgatagcgttaccactatcggcgaatgatctgattatcatagcagcgaacaacaacatcagatatttcatcgacatttttgatggattttgtgtttatgctgtttctcagtgtgtgtttatgacaagattgggaattttatattattaattcagtaatataaactaataatatattgttaattgtgtaaataatataaaaataacaatacaatattgaatgtgttgctgttaaaaatgatcataaacacggagtttattttatatgtctcgcataaacattactaaaaaaatatattgttctgtttttctttcacatctttaattatgaaaaagtaaatcattatgagatggacgagattgtacgcatcgttcgcgacagtatgtggtacatacctaacgtatttatggacgacggtaagaatgaaggtcacgtttctgtcaacaatgtctgtcatatgtatttcacgttctttgatgtggatacatcgtctcatctgtttaagctagttattaaacactgcgatctgaataaacgaggtaactctccattacattgctatacgatgaatacacgatttaatccatctgtattaaagatattgttacaccacggcatgcgtaactttgatagcaaggatgaaaaaggacaccactatcaatcgataacaagatctttgatatactaacggacaccattgatgactttagtaaatcatccgatctattgctgtgttatcttagatataaattcaatgggagcttaaactattacgttctgtacaaaggatccgacgaggatgaactcacttctcttcattactactgtaaacacatatccacgttctacaaaagcaattattacaagttaagtcacactaagatgcgagccgagaagcgattcatctacgcgataatagattatggagcaaacattaacgcggttacacacttaccttcaacagtataccaaacatagtcctcgtgtggtgtatgctcttttatctcgaggagccgatacgaggatacgtaataatcttgattgtacacccatcatggaacgattgtgcaacaggtcatattctcataatgttactcaattggcacgaacaaaaggaagaaggacaacatctactttatctattcataaaacataatcaaggatacactctcaatatactacggtatctactagataggttcgacattcagaaagacgaatactataataccgcctttcaaaattgtaacaacaatgttgcctcatacatcggatacgacatcaaccttccgactaaagacggtattcgacttggtgtttgaaaacagaaacatcatatacaaggcggatgttgtgaatgacatcatccaccacagactgaaagtatctctacctatgattaaatcgttgttctacaagatgtctctccctacgacgattactacgtaaagaagataatagcctactgcctattaagggacgagtcattcgcggaactacatagtaaattctgtttaaacgaggactataaaagtgtatttatgaaaaatatatcattcgataagatagattccatcatcgtgacataagtcgccttaaagagattcgaatctccgacaccgacctgtatacggtatcacagctatcttaaagccatacattcagacagtcacatttcatttcccatgtacgacgatctcatagaacagtgccatctatcgatggagcgtaaaagtaaactcgtcgacaaagcactcaataaattagagtctaccatcggtcaatctagactatcgtatttgcctccggaaattatgcgcaatatcatctaaacagtatgttgtacgaaaagaaccattacaaatattatccatgatagaaagaaaatatctatatgattggagaagtaggaaacaggaacaagacgacgattactacattattaaatcatgaagtccgtattatactcgtatatattgtttctctcatgtataataataaacggaagagatatagcaccgcatgcaccatccgatggaaagtgtaaagacaacgaatacaaacgccataatttgtgtccgggaacatacgcttccagattatgcgatagcaagactaacacacaatgtacgccgtgtggttcgggtaccttcacatctcgcaataatcatttacccgcttgtctaagttgtaacggaagacgcgaccgtgtaacacgactcacaatagaatctgtgaatgctctcccggatattattgtcttctcaaaggatcatccggatgcaaggcatgtgtttcccaaacaaaatgtggaataggatacggagtatccggagacgtcatctgttctccgtgtggtctcggaacatattctcacaccgtctcttccgcagataaatgcgaacccgtacccagtaatacctttaactatatcgatgtggaaattaatctgtatccagttaacgaccactaccggtctcagcgaatccatctcaacgtcggaactaactattactatgaatcataaagactgtaatcccgtatttcgtgaggaatacttctccgtccttaataaggtagcaacttcaggtttctttacaggagaaaggtgtgcactctgaatttcgagattaaatgcaataacaaaaatttttcctccaaacagttaacgaaagcaaagaatgatgacggtatcatgccgcattcggagactgtctatctagcgtcgacatctatatactatatagtaataccaatactcaagactacgaaactgatacaatctcttatcatgtgggtaatgttctcgatgtcgatagccatatgcccggtagttgcgatatacataaactgatcactaattccaaacccacccgctttttatagtaagtttttcacccataaataataaatacaataattaatttctcgtaaaagtagaaaatatattctaatttattgcacggtaaggaagtagaatcataaagaacagtactcaatcaatagcaatcatgaaacaatatatcgtcctggcatgcatgtgcctgccagtcttcagcaatcatcctcatcctcctcctcgtgtacggaagaagaaaacaaacatcatatgggaatcgatgttattatcaaagtcacaaagcaagaccaaacaccgaccaatgataagatttgccaatccgtaacggaaattacagagtccgagtcagatccagatcccgaggtggaatcagaagatgattccacatcagtcgaggatgtagatcctcctaccacttattactccatcatcggtggaggtctgagaatgaactttggattcaccaaatgtcctcagattaaatccatctcagaatccgctgatggaaacacagtgaatgctagattgtccagcgtgtccccaggacaaggtaaggactctcccgcgatcactcatgaagaagctctggctatgatcaaagactgtgaggtgtctatcgacatcagatgtagcgaagaagagaaagacagcgacatcaagacccatccagtactcgggtctaacatctctcataagaaagtgagttacgaagatatcatcggttcaacgatcgtcgatacaaaatgtgtcaagaatctagagtttagcgttcgtatcggagacatgtgcaaggaatcatctgaacttgaggtcaaggatggatttaagtatgtcgacggatcggcatctgaaggtgcaaccgatgatacttcactcatcgattcaacaaaactcaaagcgtgtgtctgaatcgataactctattcatctgaaattggatgagtagggttaatcgaacgattcaggcacaccacgaattaaaaaagtgtaccggacactatattccggtttgcaaaacaaaaatgttcttaactacattcacaaaaagttacctctcgcgacttcttctttttctgtctcaatagtgtgatacgattatgacactattcctattcctattcctatttcctttcagggtatcacaaaaatattaaacctctttctgatggtctcataaaaaaagttttacaaaaatatttttattctctttctctctttgatggtctcataaaaaaagttttacaaaaatatttttattctctttctctctttgatggtctcataaaaaaagttttacaaaaatatttttattctctttctctctttgatggtctcataaaaaaagttttacaaaaatatttttattctctttctctctttgatggtctcataaaaaaagttttacaaaaatatttttattctctttctctctttgatggtctcataaaaaaagttttacaaaaatatttttattctctttctctctttgatggtctcataaaaaaagttttacaaaaatatttttattctctttctctctttgatggtctcataaaaaaagttttacaaaaatatttttattctctttctctctttgatggtctcataaaaaatattaaacctctttctgatggtgtcactaaaatatttttattctcattctcattttctctttctctcttcaatggagtcataaaatatttttattctctttctctcttcgatggtctcacaaaaatattaaacctctttctgatggtgtcactaaaatatttttattctcattctcattttctctttctctcttcaatggagtcataaaatatttttattctctttctctcttcgatggtctcacaaaaatattaaacctctttctgatggagtcgtaaaaaagttttatctctttctctcttcgatggtctcacaaaaatattaaacctctttctgatggagtcgtaaaaaagttttatctctttctctcttcgatggtctcacaaaaatattaaacctctttctgatggagtcgtaaaaaagttttatctctttctctcttcgatggtctcacaaaaatattaaacctctttctgatggagtcgtaaaaaagttttatctctttctctcttcgatggtctcacaaaaatattaaacctctttctgatggagtcgtaaaaaagttttatctctttctctcttcgatggtctcacaaaaatattaaacctctttctgatggagtcgtaaaaaagttttatctctttctctcttcgatggtctcacaaaaatattaaacctctttctgatggagtcgtaaaaaagttttatctctttctctcttcgatggtctcacaaaaatattaaacctctttctgatggagtcgtaaaaaagttttatctctttctctcttcgatggtctcacaaaaatattaaacctctttctgatggagtcgtaaaaaagttttatctctttctctcttcgatggtctcacaaaaatattaaacctctttctgatggagtcgtaaaaaagttttatctctttctctcttcgatggtctcacaaaaatattaaacctctttctgatggagtcgtaaaaaagttttatctctttctctcttcgatggtctcacaaaaatattaaacctctttctgatggagtcgtaaaaaagttttatctctttctctcttcgatggtctcacaaaaatattaaacctctttctgatggagtcgtaaaaaagttttatctctttctctcttcgatggtctcacaaaaatattaaacctctttctgatggagtcgtaaaaaagttttatctctttctctcttcgatggtctcacaaaaatattaaacctctttctgatggagtcgtaaaaaagttttatctctttctctcttcgatggtctcacaaaaatattaaacctctttctgatggagtcgtaaaaaagttttatctctttctctcttcgatggtctcacaaaaatattaaacctctttctgatggagtcgtaaaaaagttttatctctttctctcttcgatggtctcacaaaaatattaaacctctttctgatggagtcgtaaaaaagttttatctctttctctcttcgatggtctcactaaaatattttttattctctttctgatgcatcaactatttcttaaacaataacgtccaacaacatatactcgtcgagcttatcaacatcccctatgcccatctaggttaccagacaattgtatatcataaaataatgtttataatttacacgttaaaatcatataataaaacgtagatcgtataatattttttggtatataaatgatctagtaaaatccatgtaggggatactgctcacattttttctttggtacaaaatttcacacaagtttttatacagacaaattcttgtccatatattttaaaacattgacttttgtactaagaaaaatatctagatcaactatctctttctctttctctcttcgatggtctcacaaaaatattaaacctctttctgatggagtcgtaaaaaagttttatctctttctctcttcgatggtctcacaaaaatattaaacctctttctgatggagtcgtaaaaaagttttatctctttctctcttcgatggtctcacaaaaatattaaacctctttctgatggagtcgtaaaaaagttttatctctttctctcttcgatggtctcacaaaaatattaaacctctttctgatggagtcgtaaaaaagttttatctctttctctcttcgatggtctcacaaaaatattaaacctctttctgatggagtcgtaaaaaagttttatctctttctctcttcgatggtctcacaaaaatattaaacctctttctgatggagtcgtaaaaaagttttatctctttctccttcgatggtctcacaaaaatattaaacctctttctgatggagtcgtaaaaaagttttatctctttctctcttcgatggtctcacaaaaatattaaacctctttctgatggagtcgtaaaaaagttttatctctttctctcttcgatggtctcacaaaaatattaaacctctttctgatggagtcgtaaaaaagttttatctctttctccttcgatggtctcacaaaaatattaaacctctttctgatggagtcgtaaaaaagttttatctctttctccttcgatggtctcacaaaaatattaaacctctttctgatggagtcgtaaaaaagttttatctctttctctcttcgatggtctcacaaaaatattaaacctctttctgatggagtcgtaaaaaagttttatctctttctctcttcgatggtctcacaaaaatattaaacctctttctgatggtctctataaagcgatcgatctttcttacactctagagtttcctacagtcatgggtcacacatttttttctagacactaaataaaattagtaaaattaaattaattataaaattatatatataatttactaactttagttagataaattaataatatataagttttagtacattaatattatattttaaat

SEQ ID NO: 205 - DNA, 197190 bp, Artificial Sequence
  GLV-0e407
atttaaaatataatattaatgtactaaaacttatatattattaatttatctaactaaagttagtaaattatatatataattttataattaatttaattttactaattttatttagtgtctagaaaaaaatgtgtgacccatgactgtaggaaactctagagtgtaagaaagatcgatcgctttatagagaccatcagaaagaggtttaatatttttgtgagaccatcgaagagagaaagagataaaacttttttacgactccatcagaaagaggtttaatatttttgtgagaccatcgaagagagaaagagataaaacttttttacgactccatcagaaagaggtttaatatttttgtgagaccatcgaaggagaaagagataaaacttttttacgactccatcagaaagaggtttaatatttttgtgagaccatcgaaggagaaagagataaaacttttttacgactccatcagaaagaggtttaatatttttgtgagaccatcgaagagagaaagagataaaacttttttacgactccatcagaaagaggtttaatatttttgtgagaccatcgaagagagaaagagataaaacttttttacgactccatcagaaagaggtttaatatttttgtgagaccatcgaaggagaaagagataaaacttttttacgactccatcagaaagaggtttaatatttttgtgagaccatcgaagagagaaagagataaaacttttttacgactccatcagaaagaggtttaatatttttgtgagaccatcgaagagagaaagagataaaacttttttacgactccatcagaaagaggtttaatatttttgtgagaccatcgaagagagaaagagataaaacttttttacgactccatcagaaagaggtttaatatttttgtgagaccatcgaagagagaaagagataaaacttttttacgactccatcagaaagaggtttaatatttttgtgagaccatcgaagagagaaagagataaaacttttttacgactccatcagaaagaggtttaatatttttgtgagaccatcgaagagagaaagagaaagagatagttgatctagatatttttcttagtacaaaagtcaatgttttaaaatatatggacaagaatttgtctgtataaaaacttgtgtgaaattttgtaccaaagaaaaaatgtgagcagtatcccctacatggattttactagatcatttatataccaaaaaatattatacgatctacgttttattatatgattttaacgtgtaaattataaacattattttatgatatacaattgtctggtaacctagatgggcataggggatgttgataagctcgacgagtatatgttgttggacgttattgtttaagaaatagttgatgcatcagaaagagaataaaaaatattttagtgagaccatcgaagagagaaagagataaaacttttttacgactccatcagaaagaggtttaatatttttgtgagaccatcgaagagagaaagagataaaacttttttacgactccatcagaaagaggtttaatatttttgtgagaccatcgaagagagaaagagataaaacttttttacgactccatcagaaagaggtttaatatttttgtgagaccatcgaagagagaaagagataaaacttttttacgactccatcagaaagaggtttaatatttttgtgagaccatcgaagagagaaagagataaaacttttttacgactccatcagaaagaggtttaatatttttgtgagaccatcgaagagagaaagagataaaacttttttacgactccatcagaaagaggtttaatatttttgtgagaccatcgaagagagaaagagataaaacttttttacgactccatcagaaagaggtttaatatttttgtgagaccatcgaagagagaaagagataaaacttttttacgactccatcagaaagaggtttaatatttttgtgagaccatcgaagagagaaagagataaaacttttttacgactccatcagaaagaggtttaatatttttgtgagaccatcgaagagagaaagagataaaacttttttacgactccatcagaaagaggtttaatatttttgtgagaccatcgaagagagaaagagataaaacttttttacgactccatcagaaagaggtttaatatttttgtgagaccatcgaagagagaaagagataaaacttttttacgactccatcagaaagaggtttaatatttttgtgagaccatcgaagagagaaagagataaaacttttttacgactccatcagaaagaggtttaatatttttgtgagaccatcgaagagagaaagagataaaacttttttacgactccatcagaaagaggtttaatatttttgtgagaccatcgaagagagaaagagataaaacttttttacgactccatcagaaagaggtttaatatttttgtgagaccatcgaagagagaaagagataaaacttttttacgactccatcagaaagaggtttaatatttttgtgagaccatcgaagagagaaagagataaaacttttttacgactccatcagaaagaggtttaatatttttgtgagaccatcgaagagagaaagagataaaacttttttacgactccatcagaaagaggtttaatatttttgtgagaccatcgaagagagaaagagaataaaaatattttatgactccattgaagagagaaagagaaaatgagaatgagaataaaaatattttagtgacaccatcagaaagaggtttaatatttttgtgagaccatcgaagagagaaagagaataaaaatattttatgactccattgaagagagaaagagaaaatgagaatgagaataaaaatattttagtgacaccatcagaaagaggtttaatattttttatgagaccatcaaagagagaaagagaataaaaatatttttgtaaaactttttttatgagaccatcaaagagagaaagagaataaaaatatttttgtaaaactttttttatgagaccatcaaagagagaaagagaataaaaatatttttgtaaaactttttttatgagaccatcaaagagagaaagagaataaaaatatttttgtaaaactttttttatgagaccatcaaagagagaaagagaataaaaatatttttgtaaaactttttttatgagaccatcaaagagagaaagagaataaaaatatttttgtaaaactttttttatgagaccatcaaagagagaaagagaataaaaatatttttgtaaaactttttttatgagaccatcaaagagagaaagagaataaaaatatttttgtaaaactttttttatgagaccatcagaaagaggtttaatatttttgtgataccctgaaaggaaataggaataggaataggaatagtgtcataatcgtatcacactattgagacagaaaaagaagaagtcgcgagaggtaactttttgtgaatgtagttaagaacatttttgttttgcaaaccggaatatagtgtccggtacacttttttaattcgtggtgtgcctgaatcgttcgattaaccctactcatccaatttcagatgaatagagttatcgattcagacacacgctttgagttttgttgaatcgatgagtgaagtatcatcggttgcaccttcagatgccgatccgtcgacatacttaaatccatccttgacctcaagttcagatgattccttgcacatgtctccgatacgaacgctaaactctagattcttgacacattttgtatcgacgatcgttgaaccgatgatatcttcgtaactcactttcttatgagagatgttagacccgagtactggatgggtcttgatgtcgctgtctttctcttcttcgctacatctgatgtcgatagacacctcacagtctttgatcatagccagagcttcttcatgagtgatcgcgggagagtccttaccttgtcctggggacacgctggacaatctagcattcactgtgtttccatcagcggattctgagatggatttaatctgaggacatttggtgaatccaaagttcattctcagacctccaccgatgatggagtaataagtggtaggaggatctacatcctcgactgatgtggaatcatcttctgattccacctcgggatctggatctgactcggactctgtaatttccgttacggattggcaaatcttatcattggtcggtgtttggtcttgctttgtgactttgataataacatcgattcccatatgatgtttgttttcttcttccgtacacgaggaggaggatgaggatgattgctgaagactggcaggcacatgcatgccaggacgatatattgtttcatgattgctattgattgagtactgttctttatgattctacttccttaccgtgcaataaattagaatatattttctacttttacgagaaattaattattgtatttattatttatgggtgaaaaacttactataaaaagcgggtgggtttggaattagtgatcagtttatgtatatcgcaactaccgggcatatggctatcgacatcgagaacattacccacatgataagagattgtatcagtttcgtagtcttgagtattggtattactatatagtatatagatgtcgacgctagatagacagtctccgaatgcggcatgataccgtcatcattctttgctttcgttaactgtttggaggaaaaatttttgttattgcatttaatctcgaaattcagagtgcacacctttctcctgtaaagaaacctgaagttgctaccttattaaggacggagaagtattcctcacgaaatacgggattacagtctttatgattcatagtaatagttagttccgacgttgagatggattcgctgagaccggtagtggtcgttaactggatacagattaatttccacatcgatatagttaaaggtattactgggtacgggttcgcatttatctgcggaagagacggtgtgagaatatgttccgagaccacacggagaacagatgacgtctccggatactccgtatcctattccacattttgtttgggaaacacatgccttgcatccggatgatcctttgagaagacaataatatccgggagagcattcacagattctattgtgagtcgtgttacacggtcgcgtcttccgttacaacttagacaagcgggtaaatgattattgcgagatgtgaaggtacccgaaccacacggcgtacattgtgtgttagtcttgctatcgcataatctggaagcgtatgttcccggacacaaattatggcgtttgtattcgttgtctttacactttccatcggatggtgcatgcggtgctatatctcttccgtttattattatacatgagagaaacaatatatacgagtataatacggacttcatgatttaataatgtagtaatcgtcgtcttgttcctgtttcctacttctccaatcatatagatattttctttctatcatggataatatttgtaatggttcttttcgtacaacatactgtttagatgatattgcgcataatttccggaggcaaatacgatagtctagattgaccgatggtagactctaatttattgagtgctttgtcgacgagtttacttttacgctccatcgatagatggcactgttctatgagatcgtcgtacatgggaaatgaaatgtgactgtctgaatgtatggctttaagatagctgtgataccgtatacaggtcggtgtcggagattcgaatctctttaaggcgacttatgtcacgatgatggaatctatcttatcgaatgatatatttttcataaatacacttttatagtcctcgtttaaacagaatttactatgtagttccgcgaatgactcgtcccttaataggcagtaggctattatcttctttacgtagtaatcgtcgtagggagagacatcttgtagaacaacgatttaatcataggtagagatactttcagtctgtggtggatgatgtcattcacaacatccgccttgtatatgatgtttctgttttcaaacaccaagtcgaataccgtctttagtcggaaggttgatgtcgtatccgatgtatgaggcaacattgttgttacaattttgaaaggcggtattatagtattcgtctttctgaatgtcgaacctatctagtagataccgtagtatattgagagtgtatccttgattatgttttatgaatagataaagtagatgttgtccttcttccttttgttcgtgccaattgagtaacattatgagaatatgacctgttgcacaatcgttccatgatgggtgtacaatcaagattattacgtatcctcgtatcggctcctcgagataaaagagcatacaccacacgaggactatgtttggtatactgttgaaggtaagtgtgtaaccgcgttaatgtttgctccataatctattatcgcgtagatgaatcgcttctcggctcgcatcttagtgtgacttaacttgtaataattgcttttgtagaacgtggatatgtgtttacagtagtaatgaagagaagtgagttcatcctcgtcggatcctttgtacagaacgtaatagtttaagctcccattgaatttatatctaagataacacagcaatagatcggatgatttactaaagtcatcaatggtgtccgttagtatatcaaagatcttgttatcgattgatagtggtgtcctttttcatccttgctatcaaagttacgcatgccgtggtgtaacaatatctttaatacagatggattaaatcgtgtattcatcgtatagcaatgtaatggagagttacctcgtttattcagatcgcagtgtttaataactagcttaaacagatgagacgatgtatccacatcaaagaacgtgaaatacatatgacagacattgttgacagaaacgtgaccttcattcttaccgtcgtccataaatacgttaggtatgtaccacatactgtcgcgaacgatgcgtacaatctcgtccatctcataatgatttactttttcataattaaagatgtgaaagaaaaacagaacaatatatttttttagtaatgtttatgcgagacatataaaataaactccgtgtttatgatcatttttaacagcaacacattcaatattgtattgttatttttatattatttacacaattaacaatatattattagtttatattactgaattaataatataaaattcccaatcttgtcataaacacacactgagaaacagcataaacacaaaatccatcaaaaatgtcgatgaaatatctgatgttgttgttcgctgctatgataatcagatcattcgccgatagtggtaacgctatcgaaacgacatcgccagaaattacaaacgctacaacagatattccagctatcagattatgcggtccagagggagatggatattgtttacacggtgactgtatccacgctagagatattgacggtatgtattgtagatgctctcatggttatacaggcattagatgtcagcatgtagtattagtagactatcaacgttcagaaaacccaaacactacaacgtcatatatcccatctcccggtattatgcttgtattagtaggcattattattattacgtgttgtctattatctgtttataggttcactcgacgaactaaactacctatacaagatatggttgtgccataatttttataaatttttttatgagtatttttacaaaaaaaatgtataaagtgtatgtcttatgtatatttataaaaatgctaagtatgcgatgtatctatgttatttgtatttatctaaacaatacctctacctctagatattatacaaaaattttttatttcggcatattaaagtaaaatctagttaccttgaaaatgaatacagtgggtggttccgtatcaccagtaagaacataatagtcgaatacagtatccgattgagattttgcatacaatactagtctagaaagaaatttgtaatcatcttctgtgacgggagtccatatatctgtatcatcgtctagtttatcagtgtcccatgctatattcctgttatcatcattagttaatgaaaataactctcgtgcttcagaaaagtcaaatattgtatccatacatacatctccaaaactatcgcttatacgtttatctttaacgatacctatacctagatggttatttactaacagacattttccagatctattgactataactcctatagtttccacatcaaccaagtaatgatcatctattgttatataacaataacataactcttttccatttttatcagtatgtatatctatatcaacgtcgtcgttgtagtgaatagtagtcattgatctattatatgaaacggatatgtctagaacggcaattgttttacgtccagttaacactttctttgatttaaagtctagagtctttgcaaacataatatccttatccgactttatatttcctgtagggtggtataattttattttgcctccacatatcggtgtttccaaatatattactagacaatattccatatagttattagttaagggtacccaattagaacacgtacgcttattatcatcatttggatcgtatttcataaaagttattgtactatcgatgtcaacacattctacattttttaatcgtctatatagtatttttctgatattttctataatatcagaattgtcttccatcggaagttgtatactatcggaatcagttacatgtttaaataattctctgatgtcattccttatacaatcaaattcattattaaacagtttaatagtctgtagacctttatcgtcgtaaatatccattgtcttattagttacgcttatttttatgtgttttacgttgctttattatattttataagaatgattgtttgacgaatcacgagaactattaagacacattattaggtatatattataaaaaagtttttgattacgatgttataagaggaaagaggacacattaacatcatacatcaattaactacattcttataacatcgtaatcaaaagaattgcaattttgatgtataacaactgtcaatgggttatggaattgtatattacatattatacggtatgttggtaacgacaaataccgatcggtaattgtctgccggtgtaatagaattatatatatctatctattacaccggctgagtatgcataataataagttgtggtagtatgatctccatatttataatttaggactttgtattcagtatttttggaatcataaaaaataaaaaaaagttttactaatttaaaatttaaaaagtatttacatttttttcactgtttagtcgcggatatggaattcgatcctgccaaaatcaatacatcatctatagatcatgtaacaatattacaatacatagatgaaccaaatgatataagactaacagtatgcattatccgaaatattaataacattacatattatatcaatatcacaaaaataaatacacatttggctaatcaatttcgggcttggaaaaaacgtatcgccggaagggactatatgactaacttatctagagatacaggaatacaacaatcaaaacttactgaaactatacgtaactgtcaaaaaaatagaaacatatatggtctatatatacactacaatttagttattaatgtggttattgattggataaccgatgtgattgttcaatcaatattaagagggttggtaaattggtacatagctaataatacctatacacccaataatacaacaaccatttctgagttggatatcatcaaaatactggataaatacgaggacgtgtatagagtaagtaaagaaaaagaatgtggaatttgctatgaagttgtttactcaaaacgatagatactttggtttattggattcgtgtactcatatattttgcataacatgcatcaatatatggcataaaacacgaagagaaaccggtgcgtcggataattgtcctatatgtcgtacccgttttagaaacataacaatgagcaagttctataagctagttaactaataaataaaaagtttaatttgttgacgacgtatgtcgttatttttctcgtatgaaagattaaattcaattcaattcgttgtttctaatataatctgccgtattggatggattctcaagacaattgcatttagattatattatcatgaataaaaatagtagcacgcactacttcagccaaatattcttttttgaaacgccatctatcgtagtgaggacacaagtgaacctataattatcaaatttattagtatcagtcacatgaaggactttctgtagagtgacgattctaccatctatggtactaacggtttcatcctccttgataccctcacccaaatgttctataaatttagcatcctcgtccgatctcatatcctttgccaaccaatacatgtagctaaaattaggcataaatttcacacatccagtgcaacgaaattctccagaagatgttacgatgtttaggttaggacatttgatttcgtcggcattaacatatgggtgaacacacccatacatgaaagcgatgagaaataggattctcatcttgccaaaatatcactagaaaaaatttatttatcaattttaaaggtataaaaaatacttattgttgctcgaatattttgtatttgatggtatacggaagattagaaatgtaggtattatcatcaactgattctatggttttatgtattctatcatgtttcactattgcgtcggaaataatatcatatgcttccacatatattttattttgttttaactcataatactcacgtaattctggattattggcatatctatgaataattttagctccatgatcagtaaatattaatgagaacatagtattaccacctaccattatttttttcatttcgttcaattcttgattgcaaagatctatataatcattatagcgttgacttatggactctggaatcttagacgatgtacagtcatctataatcatggcatatttaatacattgttttatagcatagtagttatctacgatgttagatatttctctcaatgaatcaatcacacaatctaatgtaggtttatgacataatagcattttcagcagttcaatgtttctagattcgttgatggcaatggctatacatgtatatccgttatttgatctaatgttgacatctgaaccggattctagcagtaaagatactagagattgtttattatatctaacagccttgtgaagaagtgtttctcctcgtttgtcaatcatgttaatgtctttaagataaggtaggcaaatgtttatagtactaagaattgggcaagcataagacatgtcacaaagaccctttttgtatgtataagtgtaaaaattataacattcatagttggatttacataggtgtccaatcgggatctctccatcatcgagataattgatggcatctcccttccttttttagtagatatttcatcgtgtaagaatcaatattaatatttctaaagtattcgtgtatagcctctttatttaccacagttccatattccactagagggatatcgccgaatgtcatatactcaattagtatatgttggaggacatccgagttcattgttttcaatatcaaaaagatggtttccttatcatttctccatagtggtacaatactacacattattccgtgcggctttccattttccaaaaacaatttgaccaaatctaaatctacatctttattgtatctataatcactatttagataatcagccataattactcgagtgcaacatgttagatcgtctatatatgaataagcagtgttatctattcctttcattaacaatttaacgatgtctatatctatatgagatgacttaatataatattgaagagctgtacaatagtttttatctatagaagacggcttgattccgtgattaattagacatttaacaacttccggacgcacatatgctctcgtatccgactttgaatacagatgagagatgatatacagatgcaatacggtaccgcaatttcgtagttgataatcatcatacgcgtatcagtactcgtcctcataaagaacactgcagccattttctatgaacaaatcaataattttaggaacaggatcattgtcattacataattttctataactgaacgatggttttcacatttaacactcaagtcaaatccatgttctaccaacacctttatcaagtcaacgtctacatttttggatttcatatagctgaatatattaaagtcatttatgttgctaaatccagtggcttctagtagagccatcgctatatcctttaactttaacatgtctactatttgtgtattcttctaatggggtagctgtctccaatttttgcgtaatggattagtgccactgtctagtagtagtttgacgacctcgacattattacaatgctcattaaaaaggtatgcgtgtaaagcattattcttgaattggttcctggtatcattaggatctctgtctctcaacatctgtttaagttcatcgagagccacctcctcattttccagatagtcaaacattttgactgaatgagctactgtgaactctatacacccacacaactaatgtcattaaatattatttttttgaatgtatttataccatgtcaaaaacttgtacaattattaataaaaataatttagtgtttaaattttaccagttccagattttacacctccgttaaccccactttttacaccactggacgatcctcctccccacattccaccgccaccagatgtataagttttagatcctttattactaccatcatgtccatggataaagacactccacatgccgccactactaccccctttagaagacatattaataagacttaaggacaagtttaacaataaaattaatcacgagtaccctactaccaacctacactattatatgattatagtttctatttttacagtaccttaactaaagtctctagtcacaagagcaatactaccaacctacactattatatgattatagtttctatttttataggaacgcgtacgagaaaatcaaatgtctaatttctaacggtagtgttgataaacgattatcgtcaatggatacctcctctatcatgtcgtctattttcttactttgttctattaacttattagcattatatattatttgattataaaacttatattgcttattagcccaatctgtaaatatcggattattaacatatcgtttctttgtaggtttatttaacatgtacatcactgtaagcatgtccgtaccatttattttaatttgacgcatatccgcaatttctttttcgcagtcggttataaattctatatatgatggatacatgctacatgtgtacttataatcgactaatatgaagtacttgatacatattttcagtaacgatttattattaccacctatgaataagtacctgtgatcgtctaggtaatcaactgttttcttaatacattcgatggttggtaatttactcagaataatttccaatatcttaatatataattctgctatttctgggatatatttatctgccagtataacacaaatagtaatacatgtaaacccatattttgttattatattaatgtctgcgccattatctattaaccattctactaggctgacactatgcgacttaatacaatgataaagtatactacatccatgtttatctattttgtttatatcatcaatatacggcttacaaagttttagtatcgataacacatccaactcacgcatagagaaggtagggaataatggcataatatttattaggttatcatcattgtcattatctacaactaagtttccattttttaaaatatactcgacaactttaggatctctattgccaaatttttgaaaatatttatttatatgcttaaatctatataatgtagctccttcatcaatcatacatttaataacattgatgtatactgtatgataagatacatattctaacaatagatcttgtatagaatctgtatatcttttaagaattgtggatattaggatattattacgtaaactattacacaattctaaaatataaaacgtatcacggtcgaataatagttgatcaactatataattatcgattttgtgatttttcttcctaaactgtttacgtaaatagttagatagaatattcattagttcatgaccactatagttactatcgaataacgcgtcaaatatttcccgtttaatatcgcatttgtcaagataataatagagtgtggtatgttcacgataagtataataacgcatctcttttttgtgtgaaattaaatagtttatcacgtccaaagatgtagcataaccatcttgtgacctagtaataatataataatagagaactgttttacccattctatcatcataatcagtggtgtagtcgtaatcgtaatcgtctaattcatcatcccaattataatattcaccagcacgtctaatctgttctattttgatcttgtatccatactgtatgttgctacatgtaggtattcctttatccaataatagtttaaacacatctacattgggatttgatgttgtagcgtatttctctacaatattaataccatttttgatactatttatttctatacctttcgaaattagtaatttcaataagtctatatcgatgttatcagaacatagatattcgaatatatcaaaatcattgatatttttatagtcgactgacgacaataacaaaatcacaacatcgtttttgatattattatttttcttggtaacgtatgcctttaatggagtttcaccatcatactcatataatggatttgcaccactttctatcaatgattgtgcactgctggcatcgatgttaaatgttttacaactatcatagagtatcttatcgttaaccatgattggttgttgatgctatcgcattttttggtttctttcatttcagttatgtatggatttagcacgtttgggaagcatgagctcatatgatttcagtactgtagtgtcagtactattagtttcgatcagatcaatgtctagatctatagaatcaaaacacgataggtcagaagataatgaatatctgtacgcttctttttgtactgtaacttctggttttgttagatggttgcatcgtgctttaacatcaatggtacaaattttatcctcgctttgtgtatcatattcgtctctagtataaaattctatattcagattatcatgcgatgtgtatacgctaacggtatcaataaacggagcacaccatttagtcataacagtaatccaaaattttttaaagtatatcttaacgaaagaagttgtgtcattgtctacggtgtatggtactagatcctcataagtgtatatatctagagtaatgtttaatttattaaatggttgataatatggatcctcatgacaatttccgaagatggaaatgagatatagacatgcaataaatctaatcgaagacatggttactccttaaaaaaatacgaataatcaccttggctatttagtaagtgtcatttaacactatactcatattaatccatggactcataatctctatacgggattaacggatgttctatatacggggatgagtagttttcttctttaactttatactttttactaatcatatttagactgatgtatgggtaatagtgtttaaagagttcgttctcatcatcagaataaatcaatatctctgtttttttgttatacagatgtattacagcctcatatattacgtaatagaacgtgtcatctaccttattaactttcaccgcatagttgtttgcaaatacggttaatcctttgacctcgtcgatttccgaccaatctgggcgtataatgaatctaaactttaatttcttgtaatcattcgaaataatttttagtttgcatccgtagttatcccctttatgtaactgtaaatttctcaacgcgatatctccattaataatgatgtcgaattcgtgctgtatacccatactgaatggatgaactaacgaatatcaacggcgttaatagtaatttactttttcatctttacatattgggtactagttttactatcataagtttataaattccacaagctactatggaataagccaaccatcttagtataccacacatgtcttaaagtttattaattaattacatgttgttttatatatatcgctacgaatttaaagagaaatcagtttaggaagaaaaaaattatctatctacatcatcacgtctctgtattctacgatagagtgctactttaagatgagacatatccgtgtcatcaaaaatatactccattaaaatgattattccggcagcgaacttgatattggatatatcacaacctttgttaatatctacgacaatagacagcagtcccatggttccataaacagtgagtttatctttctttgaagcgatagtttgtagagatcttataaaaccgtcaaacgacatcgcatttatatctttagctaattcatatatgttaccatcgtaatatctaaccgcgtctatcttaaacgtttccatcgctttaaagacgtttccgatagatggtctcatttcatcagtcatactgagccaacaaatataatcgtgtataacatctttgatagaatcagactctaaagaaaacgaatcggctttattatacgcattcatgataaacttaatgaaaaatgtttttcgttgtttaagttggatgaatagtatgtcttaataattgttattatttcattaattaatatttagtaacgagtacactctataaaaacgagaatgacataactagttatcaaagtgtctaggacgcgtaattttcatatggtatagatcctgtaagcattgtctgtattctggagctattttctttatcgcattagtaagttcagaatatgttataaatttaaatcgaataacgaacatgactttagtaaagtcgtctatattaactcttttattttctagccatcgtaataccatgtttaagatagtatattctctagttactacgatctcatcgttgtctagaatatcacatactgaatctacatccaattttagaaattggtctgtgttacatatctcttctatattattgttgatgtattgtcgtagaaaactattacgtagaccattttctttataaaacgaatatatagtactccaattatctttaccgatatatttgcacacataatccattctctcaatcactacatctttaagattttcgttgttaagatatttggctaaactatataattctattagatcatcaacagaatcagtatatatttttctagatccaaagacgaactctttggcgtcctctataatattcccagaaaagatattttcgtgttttagtttatcgagatctgatctgttcatatacgccatgattgtacggtacgttatgataaccgcataaaataaaaatccattttcatttttaaccaatactattcataattgagattgatgtaatactttgttactttgaacgtaaagacagtacacggatccgtatctccaacaagcacgtagtaatcaaatttggtgttgttaaacttcgcaatattcatcaatttagatagaaacttatactcatcatctgttttaggaatccatgtattattaccactttccaacttatcattatcccaggctatgtttcgtccatcatcgttgcgcagagtgaataattcttttgtattcggtagttcaaatatatgatccatgcatagatcggcaaagctattgtagatgtgatttttcctaaatctaatataaaactcgtttactagcaaacactttcctgatttatcgaccaagacacatatggtttctaaatctatcaagtggtggggatccatagttatgacgcagtaacatagattattacattcttgactgtcgctaatatctaaatatttattgttatcgtattggattctgcatatagatggcttgtatgtcaaagatatagaacacataaccaatttatagtcgcgctttacattctcgaatctaaagttaagagatttagaaaacattatatcctcggatgatgttatcactgtttctggagtaggatatattaaagtctttacagatttcgtccgattcaaataaatcactaaataatatcccacattatcatctgttagagtagtatcattaaatctattatattttatgaaagatatatcactgctcacctctatatttcgtacatttttaaactgtttgtataatatctctctgatacaatcagatatatctattgtgtcggtagacgataccgttacatttgaattaatggtgttccattttacaacttttaacaagttgaccaattcatttctaatagtatcaaactctccatgattaaatattttaatagtatccattttatatcactacggacacaaagtagctgacataaaccattgtataatttttatgttttatgtttattagcgtacacattttggaagttccggcttccatgtatttcctggagagcaagtagatgatgaggaaccagatagtttatatccgtacttgcacttaaagtctacattgtcgttgtatgagtatgatcttttaaacccgctagacaagtatccgtttgatattgtaggatgtggacatttaacaatctgacacgtgggtggatcggaccattctcctcctgaacacaggacaccagagttaccaatcaacgaatatccactattgcaactataagttacaacgctcccatcggtataaaaatcctcgtatccgttatgtcttccgttggatatagatggaggggattggcatttaacagattcacaaataggtgcctcgggattccataccatagatccagtagatcctaattcacaatacgatttagattcaccgatcaaatgatatccgctattacaagagtacgttatactagagccaaagtctactccaccaatatcaagttggccattatcgatatctcgaggcgatgggcatctccgtttaatacattgattaaagagtgtccatccagtacctgtacatttagcatatataggtcccattttttgctttctgtatccaggtagacatagatattctatagtgtctcctatgttgtaattagcattagcatcagtctccacactattcttaaatttcatattaatgggtcgtgacggaatagtacagcatgatagaacgcatcctattcccaacaatgtcaggaacgtcacgctctccaccttcatatttatttatccgtaaaaatgttatcctggacatcgtacaaataataaaaagcccatatatgttcgctattgtagaaattgtttttcacagttgctcaaaaacgatggcagtgacttatgagttacgttacactttggagtctcatctttagtaaacatatcataatattcgatattacgagttgacatatcgaacaaattccaagtatttgattttggataatattcgtattttgcatctgctataattaagatataatcaccgcaagaacacacgaacatctttcctacatggttaaagtacatgtataattctatccatttgtcttccttaactatatatttgtatagataattacgagtctcgtgagtaattccagtaattacatagatgtcgccgtcgtactctacagcataaactatactatgatgtctaggcatgggagacttttttatccaacgatttttagtgaaacattccacatcgtttaatactacatatttttcatacgtggtataaactccacccattacatatatatcatcgtttacgaataccgacgcgcctgaatatctaggagtaattaagtttggaagtcttatccatttcgaagtgccgtgtttcaaatattctgccacacccgttgaaatagaaaattctaatcctcctattacatataactttccatcgttaacacaagtactaacttctgattttaacgacgacatattagtaaccgttttccattttttcgtttcaagatctacccgcgatacggaataaacatgtctattgttaatcatgccgccaataatgtatagacaattatgtaaaacatttgcattatagaattgtctatctgtattaccgactatcgtccaatattctgttctaggagagtaatgggttattgtggatatataatcagagtttttaatgactactatattatgttttataccatttcgtgtcactggctttgtagatttggatatagttaatcccaacaatgatatagcattgcgcatagtattagtcataaacttgggatgtaaaatgttgatgatatctacatcgtttggatttttatgtatccactttaataatatcatagctgtaacatcctcatgatttacgttaacgttttcgtgggataagatagttgtcagttcatcctttgataattttccaaattctggatcggatgtcaccgcagtaatattgttgattatttctgacatcgacgcattatatagttttttaattccatatcttttagaaaagttaaacatccttatacaatttgtggaattaatattatgaatcatagtttttacacatagatctactacaggcggaacatcaattattatggcagcaactagtatcatttctacattgtttatggtgatgtttatcttcttccagcgtatatagtctaatagcgattcaaacgcgtgatagtttataccattcaatataatcgcttcatcctttagatggtgatcctgaattcgtttaaaaaaattatacggagatgccgtaataatttccttattcacttgtataatttccccattgatagaaaatatcacgctttccattcttgaagtactataagtaattatagtataatgtaaaggtttatatattcaatattttttataaaaaaatcattttgacattaattcctttttaaatttccgtctatcatctatagaaacgtattctatgaatttataaaatgcttttacgtgtcctatcgtaggcgatagaaccgctaaaaagcctatcgaatttctacaaaagaatctgttatatggtatagggagagtataaaacattaaatgtccgtacttattaaagtattcagtagccaatcctaactctttcgaatacttattaatggctcttgttctgtacgaatctatttttttgaacaacggacctagtggtatatcttgttctatgtatctaaaataatgtctgactagatccgttagtttaatatcctcagtcatcttgtctagaatggcaaatctaactgcgggtttaggctttagtttagtttttatatctacatctatgtctttatctaacaccaaaaatataatagctaatattttattacaatcatccggatattcttctacgatctcactaactaatgtttctttggttatactagtatagtcactatcggacaaataaagaaaatcagatgatcgatgaataatacatttaaattcatcatctgtaagatttttgagatgtctcattaaaatattattagggtcagtactcattatcattcggcagctattacttattttatttttctgtattttattatttttcaccatatagatcaatcattagatcatcaaaatatgtttcaatcatcctaaagagtatggtgaatgactcttcccatctaatttctgaacgttcaccaatgtctctagccactttggcactaatagcgatcattcgcttagcgtcttctatattattaactggttgattcaatctatctagcaatggaccgtcggacagcgtcattctcatgttcttaatcaatgtacatacatcgccgtcatctaccaattcatccaacaacataagctttttaaaatcatcattataataggtttgatcgttgtcatttctccaaagaatatatctaataagtagagtcctcatgcttagtaatttaactattttagttaacaactattttttatgttaaatcaattagtacaccgctatgtttaatacttattcatattttagtttttaggattgagaatcaatacaaaaaattaatgcatcattaattttagaaatacttagtttccacgtagttaatgaaacatttgaactcatcgtacaggacgttctcgtacaggacgtaactataaaccggtttatatttgttcaagatagatacaaatccgataactttttttacgaattctacgggatccactttaaaagtgtcataccgggttctttttattcttttaaacagatcaatggtgtgatgttgattaggtcttttacgaatttgatatagaatagcgttcacatatcctccataatggtcaatcgccatttgttcgtatgtcataaattctttaattatatgacactgtgtattatttagttcatccttgttcatcattaggaatctatccaaaatggcaattatactagaactataggtgcgttgtatacacatattgatgtgtctgtttatacaatccatgatatttggatccatgctactaccttcgggtaaaattgtagcatcatataccatttctagtactttaggttcattattatccattgcagaggacgtcatgatcgaatcctaaaaaaatatattatttttatgttattttgttaaaaataatcatcgaatacttcgtaagatactccttcatgaacataatcagttacaaaacgtttatatgaagtaaagtatctacgatttttacaaaagtccggatgcataagtacaaagtacgcgataaacggaataataatagatttatctagtctatctttttctatagctttcatagttagatacatggtctcagaagtaggattatgtaacatcagcttcgataaaatgactgggttatttagtcttacacattcgctcatacatgtatgaccgttaactacaaagtctacactaaaatgattgaacaatagatagtctaccattgtttcgtattcagatagtacagcgtagtacatagcatcttcacaaattatatcattgtctaatagatatttgacgcatcttatggatcccacttcaacagccatcttaaaatcggtagaatcatattgctttcctttatcattaataatttctaaaacatcatctctatcataaaagatacaaatattaactgtttgatccgtaataacattgctagtcgatagcaatttgttaataagatgcgctgggctcaatgtcttaataagaagtgtaagaggactatctccgaatttgttttgtttattaacatccgttgatggaagtaaaagatctataatgtctacattcttgactgttttagagcatacaatatggagaggtgtatttccatcatgatctggttttgagggactaattcctagtttcatcatccatgagattgtagaagcttttggattgtctgacataagatgtctatgaatatgatttttgccaaatttatccactatcctggcttcgaatccgatggacattatttttttaaacactctttctgaaggatctgtacacgccaacaacggaccacatccttcttcatcaaccgagttgttaatcttggctccatactgtaccaataaatttattctctctatgacttcatcatctgttcccgagagataatatagaggtgttttattatgtttatcacacgcgtttggatctgcgccgtgcgtcagcagcatcgcgactattctattattattaattttagaagctatatgcaatggataatttccatcatcatccgtctcatttggagagtatcctctatgaagaagttcttcgacaaatcgttcatctagtcctttaattccacaatacgcatgtagaatgtgataattatttccagaaggttcgatagcttgtagcatattcctaaatacatctaaatttttactattatatttggcataaagagatagataatactcggccgacataatgttgtccattgtagtataaaaattaatatttctatttctatttctgtatatttgcaacaatttactctctataacaaatatcataacttagttcttttatgtcaagaaggcactggtttagttcatctataaatgtcacgccataactaccacgcatgctatactcagaattatgataaagatatttatccttggggtgtaggtaatggggattaatctttgttggatcagtctctaagttaacacatgtcacacatgatccatttatagttatatcacacgatgatgatttatgaattgattccggaagatcgctatcgtattttgtggttccacaattcatttccatacatgttattgtcacactaatattatgatgaactttatctagccgctgagtggtaaacaacagaacagatagtttattatctttaccaacaccctcagccgctgccacaaatctctgatccgtatccatgatggtcatgtttatttctagtccgtatccagtcaacactatgttagcatttctgtcgatatagctttcactcatatgacactcaccaataatagtagaattaatgtcgtaatttacaccaatagtgagttcggcggcaaagtaccaataccggtaatcttgtcgaggaggacatatagtattcttgtattctaccgaatacccgagagatgcgatacaaaagagtaagactaatttgtaaaccatcttactcaaaatatgtaacaatagtacgatgcaatgagtaagacaataggaaatctatcttatatacacataattattctatcaattttaccaattagttagtgtaatgttaacaaaaatgtgggagaatctaattagtttttctttacacaattgacgtacatgagtctgagttccttgtttttgctaattatttcatccaatttattattcttgactatatcgagatcttttgtataggagtcagacttgtattcaacatgcttttctataatcattttagctatttcggcatcatccaatagtacattttccagattagcagaatagatattaatgtcgtatttgaacagagcctgtaacatctcaatgtctttattatctatagccaatttaatgtccggaatgaagagaagggaattattggtgtttgtcgacgtcatatagtcgagcaagagaatcatcatatccacgtgtccattttttatagtgatgtgaatacaactaaggagaatagccagatcaaaagtagatggtatctctgaaagaaagtaggaaacaatacttacatcattaagcatgacggcatgataaaatgaagttttccatccagttttcccatagaacatcagtctccaatttttcttaacaaacagttttaccgtttgcatgttaccactatcaaccgcataatacaatgcggtgtttcccttgtcatcaaattgtgaatcatccagtccactgaatagcaaaatctttactattttggtatcttccaatgtggctgcctgatgtaatggaaattcattctctagaagatttttcaatgctccagcgttcaacaacgtacatactagacgcacgttattatcagctattgcataatacaaggcactatgtccatggacatccgccttaaatgcatctttgctagagagaaagcttttcagctgcttagacttccaagtattaattcgtgacagatccatgtctgaaacgagacgctaattagtgtatattttttcattttttataattttgtcatattgcaccagaattaataatatctctaatagatctgattagtagatacatggctatcgcaaaacaacatatacacatttaataaaaataatatttattaagaaaattcagatttcacgtacccatcaatataaataaaataatgattccttacaccgtacccatattaaggagattccaccttacccataaacaatataaatccagtaatatcatgtctgatgatgaacacaaatggtgtattaaattccagtttttcaggagatgatctcgccgtagctaccataatagtagatgcctctgctacagttccttgttcgtcgacatctatctttgcattctgaaacattttataaatatataatgggtccctagtcatatgtttaaacgacgcattatctggattaaacatactaggagccatcatttcggctatcgacttaatatccctcttattttcgatagaaaatttagggagtttaagattgtacactttattccctaattgaaacgaccaatagtctaattttgcagccgtaatagaatctgtgaaatgggtcatattatcacctattgccaggtacatactaatattagcatccttatacggaaggcgtaccatatcatattcttcgtcatcgattgtgattgtatttccttgcaatttagtaactacgttcatcatgggaaccgttttcgtaccgtacttattagtaaaactagcattgcgtgttttagtgatatcaaacggatattgccatatacctttaaaatatatagtattaatgattgcccatagagtattattgtcgagcatattagaatctactacattagacataccggatctacgttctactatagaattaattttattaaccgcatctcgtctaaagtttaatctatataggccgaatctatgatattgttgataatacgacggtttaatgcacacagtattatctacgaaactttgataagttagatcagtgtacgtatatttagatgttttcagcttagctaatcctgatattaattctgtaaatgctggacccagatctctttttctcaaatccatagtcttcaataattctattctagtattacctgatgcaggcaatagcgacataaacatagaaaacgaataaccaaacggtgagaagacaatattatcatcttgaatatttttatacgctactataccggcattggtaaatccttgcagacgataggtagacactgaacacgttaacgatagtatcaataacgcaatcatgattttatggtattaataattaaccttatttttatgttcggtataaaaattattgatgtctacacatccttttgtaattgacatctatatatccttttgtataatcaactctaatcactttaacttttacagttttccctaccagtttatccctatattcaacatatctatccatatgcatcttaacactctctgccaagatagcttcaaagtgaggatagtcaaaaagataaatatatagagcataatccttctcgtatactctgccctttattacatcacccgcattgggcaacgaataacaaaatgcaagcatcttgttaacgggctcgtaaattgggataaaaattatgtttttatatctattttattcaagagaatattcaggaatttctttttccggttgtatctcatcgcagtatatatcatttgtacattgtttcatattttttaatagtctacaccttttagtaggactagtatcgtacaattcatagctgtattttgaattccaatcacgcataaaaatatcttccaattgttgacgaagacctaatccatcatccggtgtaatattaatagatgctccacatgtatccgtaaagtaatttcctgtccaatttgaggtacctatatacgccgttttatcggttaccatatatttggcatggtttaccctagaatacggaatgggaggatcagcatctggtacaataaatagctttacttctatatttatgtttttagattttagcatagcgatagatcttaaaaagtttctcatgataaacgaagatcgttgccagcaactaatcaatagcttaactgacacttgtctgtctatagcggctcttcttaattcatcttctatataaggccaaaacaaaatattgcctgccttcgaataaataatagggataaagttcataacagatacataaacgaatttactcgcatttctgatacatgacaataaagcggttaaatcattggttctttccatagtacatagttgttgcggtgcagaagcaataaatacagagtgtggaacgccgcttacgttaatactaagaggatgatctgtattataatacgacggataaaagtttttccaattatatggtagattgttaactccaagataccagtatacctcaaaaatttgagtgagatccgctgccaagttcctattattgaagatcgcaatacccaattctttgacctgagttagtgatctccaatccatgttagcgcttcctaaataaatatgtgtattatcagatatccaaaattttgtatgaagaactcctcctaggatatttgtaatatctatgtatcgtacttcaactccggccatttgtagtctttcaacatcctttaatggtttgttagatttattgacggctactctaactcgtactcctcttttgggtaattgtacaatcttgtttaatattatcgtgccgaaattcgtacccacttcatccgataaactccaataaaaagatgatatatctagtgtttttgtggtattggatagaatttccctccacatgttaaatgtagacaaatatactttatcaaattgcatacctataggaatagtctctgtaatcactgcgattgtattatccggattcattttatttgttaaaagaataatcctatatcacttcactctattaaaaatccaagtttctatttctttcatgactgattttttaacttcatccgtttccttatgaagatgatgtttggcaccttcataaatttttatttctctattacaatttgcatgttgcatgaaataatatgcacctaaaacatcgctaatcttattgtttgttccctggagtatgagagtcggggggtgttaatcttggaaattatttttctaaccttgttggtagccttcaagacctgactagcaaatccagccttaattttttcatgattgattaatgggtcgtattggtatttataaactttatccatatctctagatactgattctggacatagctttccgactggcgcatttagtgtgatggttcccataagtttggcagctagcagattcagttttgaaacagcatctgcattaactagaggagacattagaatcattgctgtaaacaagtttggattatcgtaagaggctagctcccatggaatgacccaataagtagatttaatagttaccacgtgctgtaccaaagtcatcaatcatcattttttcaccattacttcttccatgtccaatatgatcatgtgagaatactaaaattcctaacgatgatatgttttcagctagttcgtcataacgtccagaatgtttaccagctccatgacttatgaatactaatgccttaggatatgtaataggtttccaatatatgtaatcattgtccagattgaacatacagtttgcactcatgattcacgttatataactatcaatattaacagttcgtttgatgatcatattatttttatgttttattgataattgtaaaaacatacaattaaatcaatatagaggaaggagacggctactgtcttttgtgagatagtcatggcgactaaattagattatgaggatgctgttttttactttgtggatgatgataaaatatgtagtcgcgactccatcatcgatctaatagatgaatatattacgtggagaaatcatgttatagtgtttaacaaagatattaccagttgtggaagactgtacaaggaattgatgaagttcgatgatgtcgctatacggtactatggtattgataaaattaatgagattgtcgaagctatgagcgaaggagaccactacatcaattttacaaaagtccatgatcaggaaagtttattcgctaccataggaatatgtgctaaaatcactgaacattggggatacaaaaagatttcagaatctagattccaatcattgggaaacattacagatctgatgaccgacgataatataaacatcttgatactttttctagaaaaaaaattgaattgatgatataggggtcttcataacgcataattattacgttagcattctatatccgtgttaaaaaaaattatcctatcatgtatttgagagttttatatgtagcaaacatgatagctgtgatgccaataagctttagatattcacgcgtgctagtgttagggatggtattatctggtggtgaaatgtccgttatataatctacaaaataatcatcgcatatagtatgcgatagtagagtaaacatttttatcgtttctactgggttcatacatcgtctacccaattcggttataaatgaaattgtcgccaatcttacacccaaccccttgttatccattagtatagtattaacttcgttatttatgtcataaactgtaaatgattttgtagatgccatatcatacatgatattcatgtccctattataatcattactaactttatcacaatatatgttgataatatctatatatgatctagtctttgtgggcaactgtctatacaagtcgtctaaacgttgtttactcatatagtatcgaacagccatcattacatggtcccgttccgttgatagataatcgagtatgttagtggacttgtcaaatctatataccatattttctggaagtggatatacatagtcgtgatcaacattattgctagcctcatcttctatatcctgtactataccattatctatatcatctacataatctacgatattattacacataaacatcgacaacatactattgtttattatctaagtcctgttgatccaaacccttgatctcctctatttgtactatctagagattgtacttcttccagttctggataatatatacgttgatagattagctgagctattctatctccagtatttacattaaacgtacattttccattattaataagaatgactcctatgtttcccctataatcttcgtctattacaccgcctcctatatcaatgccttttagggacagaccagacctaggagctattctaccatagcagaacttaggcatggacatactaatatctgtcttaattaactgtcgttctcctggagggatagtataatcgtaagcgctatataaatcatatccggcggcgtaaggtgattgcctagtaggagatttagctctgttagtttccttaacaaatctaactggtgagttaatattcatgttgaacataaaactaatattttatttcaaaattatttaccatcccatatattccatgaataagtgtgatgattgtacacttctatagtatctatatacgattcacgataaaatcctcctatcaatagcagtttattatccactatgatcaattctggattatccctcggataaataggatcatctatcagagtccatgtattgctggattcacaataaaattccgcatttctaccaaccaagaataaccttctaccgaacactaacgcgcatgatttataatgaggataataagtggatggtccaaactgccactgatcatgattgggtagcaaatattctgtagttgtatcagtttcagaatgtcctcccattacgtatataacattgtttatggatgccactgctggattacatctaggtttcagaagactcggcatattaacccaagcagcatccccgtggaaccaacgctcaacagatgtgggatttggtagacctcctactacgtataatttattgttagcgggtatcccgctagcatacagtctggggctattcatcggaggaattggaatccaattgtttgatatataatttaccgctatagcattgttatgtatttcattgttcatccatccaccgatgagatatactacttctccaacatgagtacttgtacacatatggaatatatctataatttgatccatgttcataggatactctatgaatggatacttgtatgatttgcgtggttgtttatcacaatgaaatattttggtacagtctagtatccattttacattatttatacctctgggagaaagataatttgacctgattacatttttgataaggagtagcagatttcctaatttatttcttcgctttatataccacttaatgacaaaatcaactacataatcctcatctggaacatttagttcatcgctttctagaataagtttcatagatagataatcaaaattgtctatgatgtcatcttccagttccaaaaagtgtttggcaataaagtttttagtatgacataagagattggatagtccgtattctatacccatcatgtaacactcgacacaatattcctttctaaaatctcgtaagataaagtttatacaagtgtagatgataaattctacagaggttaatatagaagcacgtaataaattgacgacgttatgactatctatatatacctttccagtatacgagtaaataactatagaagttaaactgtgaatgtcaaggtctagacaaacccttgtaactggatctttatttttcgtgtatttttgacgtaaatgtgtgcgaaagtaaggagataactttttcaatatcgtagaattgactattatattgccacctatagcatcaataattgttttgaatttcttagtcatagacaatgctaatatattcttacagtacacagtattaacaaatatcggcatttatgtttctttaaaagtcaacatctaaagaaaaatgattatcttcttgagacataactcccattttttggtattcacccacacgtttttcgaaaaaattagtttttccttccaatgatatattttccatgaaatcaaacggattggtaacattataaatttttttaaatcccaattcagaaatcaatctatccgcgacgaattctatatatgttttcatcatttcacaattcattcctataagtttaactggaagagccgcagtaagaaattcttgttcaatggataccgcatctgttataatagatctaacggtttcttcactcggtggatgcaataaatgtttaaacatcaaacatgcgaaatcgcagtgcagaccctcgtctctactaattagttcgttggaaaacgtgagtccgggcattaggccacgctttttaagccaaaatatggaagcgaatgatccagaaaagaagattccttctactgcagcaaaggcaataagtctctctccataaccggcgctgtcatgtatccacttttgagcccaatcggccttcttttttacacaaggcatcgtttctatggcattaaagagatagtttttttcattactatctttaacataagtatcgatcaaaagactatacatttccgaatgaatgttttcaatggccatctgaaatccgtagaaacatctagcctcggtaatctgtacttctgtacaaaatcgttccgccaaattttcattcactattccgtcactggctgcaaaaaacgccaatacatgttttataaaatatttttcgtctggtgttagtttattccaatcattgatatctttagatatatctacttcttccactgtccaaaatgatgcctctgcctttttatacatgttccagatgtcataatattggattgggaaaataacaaatctatttggatttggtgcaaggatgggttccataactaaattaacaataacaataaattttttttcagttatctatatgcctgtacttggatcttttgtacatcgatatcgccgcaatcactacaataattacaagtattattgatagcattgttattagtactatcataattaaattatcgacattcatgggtgctgaataatcgttattatcatcattatcattttgtaattgtgacatcatactagataaatcgtttgcgagattgttgtgggaagcgggcatggaggatgaattatcgttattattatttaacgcctcccattcggattcacaaatgttacgcacattcaacattttatggaaactataattttgtgaaaacagataacaagaaaactcgtcatcgttcaaatttttaacgatagtaaaccgattaaacgtcgagctaatttctaacgctagcgactctgttggatatgggtttccagatatatatcttttcagttcccctacgtatctataatcatctgtaggaaatggaagatatttccatttatctactgttcctaatatcatatgtggtggtgtagtagaaccattaagcgcgaaagatgttatttcgcatcgtattttaacttcgcaataatttctggttagataacgcactctaccagtcaagtcaatgatattagcctttacagatatattcatagtagttgtaacgatgactccatcttttagatgcgatactcctttgtatgtaccagaatcttcgtaccgcaaactcgatatatttaaacaagttaatgagatattaacgcgttttatgaatgatgatatataaccagaagttttatcctcggtggctagcgctataaccttatcattataataccaactagtgtgattaatatgtgacacgttagtgtgggtacaaatatgtacattatcgtctacgtcgtattcgatacatccgcatacagccaacaaatataaaatgacaaatactctaacgccgttcgtacccatcttgatgcggtttaataaatgttttgatttcaatttattgtaaaaaaagattcggttttatactgttcgatattctcattgcttatattttcatctatcatctccacacagtcaaatccgtggttagcatgcacctcatcaaccggtaaaagactatcggactcttctatcattataactctagaatatttaatttggtcattattaatcaagtcaattatcttatttttaacaaacgtgagtattttactcattttttataaaaacttttagaaatatacagactctatcgtgtgtctatatcttctttttatatccaatgtatttatgtctgatttttcttcatttatcatatataatggtccaaattctacacgtgcttcggattcatccagatcattaaggttcttataattgtaacatccttctcttccctcttctacatcttccttcttattcttattcttagcgtcacagaatctaccacagcaggatcccatgacgagcgtcatattaaactaatccattttcaattataatatacgattagtaatgaccattaaaataaaaaatattcttcataaccggcaagaaagtgaaaagttcacattgaaactatgtcagtagtatacatcatgaaatgatgatatatatatactctattttggtggaggattatatgatataattcgtggataatcattcttaagacacatttcttcattcgtaaatcttttcacgttaaatgagtgtccatattttgcaatttcttcatatgatggcggtgtacgtggacgaagctgctcctgttcttgttgtagtcgccgactgtcgtgtttgcgtttagatccctccattatcgcgattgcgtagatggagtactattatataccttgtaattaaatttttttattaattaaacgtataaaaacgttccgtatctgtatttaagagccagatttcgtctaatagaacaaatagctacagtaaaaataactagaataattgctacacccactagaaaccacggatcgtaatacggcaatcggttttcgataataggtggaacgtatattttatttaaggacttaacaattgtctgtaaaccacaatttgcttccgcggatcctgtattaactatctgtaaaagcatatgttgaccgggcggagccgaacattctccgatatctaatttctgtatatctataatattattaacctccgcatacgcattacagttcttttctagcttggataccgcactaggtacatcgtctagatctattcctatttcttcagcgatagctcttctatccttttccggaagcaatgaaatcacttcaataaatgattcaaccatgagtgtgaaactaagtcgagaattactcatgcatttgttagttattcggagcgcgcaatttttaaactgtcctataacctctcctatatgaatagcacaagtgacattagtagggatagaatgttgagctaatttttgtaaataactatctataaaaagattatacaaagttttaaactctttagtttccgccatttatccagtctgagaaaatgtctctcataataaatttttccaagaaactaattgggtgaagaatggaaacctttaatctatatttatcacagtctgttttggtacacatgatgaattcttctaatgctgtactaaattcgatatctttttcgatttctggatatgtttttaataaagtatgaacaaagaaatggaaatcgtaataccagttatgttcaactttgaaattgttttttattttcttgttaatgattccagccacttgggaaaagtcaaagtcgtttaatgccgatttaatacgttcattaaaaacaaactttttatcctttagatgaattattattggttcattggaatcaaaaagtaagatattatcgggtttaagatctgcgtgtaaaaagttgtcgcaacagggtagttcgtagattttaatgtataacagagccatctgtaaaaagataaactttatgtattgtaccaaagatttaaatcctaatttgatagctaactcggtatctactttatctgccgaatacagtgctaggggaaaaattataatatttcctctttcgtattcgtagttagttctcttttcatgttcgaaaaagtgaaacatgcggttaaaatagtttataacattaatattactgttaataactgccggataaaagtgggatagtaatttcacgaatttgatactgtcctttctctcgttaaacgcctttaaaaaaactttagaagaatatctcaatgagagttcctgaccatccatagtttgtatcaataatagcaacatatgaagaacccgtttatacagagtatgtaaaaatgttaatttatagtttaatcccatggcccacgcacacacgattaattttttttcatctccctttagattgttgtatagaaatttgggtactgtgaactccgccgtagtttccatgggactatataattttgtggcctcgaatacaaattttactacatagttatctatcttaaagactataccatatcctcctgtagatatgtgataaaaatcgtcgtttataggataaaatcgtttatccttttgttggaaaaaggatgaattaatgtaatcattctcttctatctttagtagtgtttccttattaaaattcttaaaataatttaacaatctaactgacggagcccaattttggtgtaaatctaattgggacattatgttgttaaaatacaaacagtctcctaatataacagtatctgataatctatggggagacatccattgatattcaggggatgaatcattggcaacacccatttattgtacaaaaagccccaatttacaaacgaaagtccaggtttgatagagacaaacaattaactattttgtctctgtttttaatttctttggtaatgaaattattcacaatatcagtatcttctttatctaccagagattttactaacttgataaccttggctgtctcattcaatagggtagtaatatttgtatgtgtgatattgatatctttttgaattgtttcttttagaagtgattctttgatggtgccagcatacgaattacaataatgcagaaactcagttaacatgcaggaattatagtaagccaattccaattgttgcctgtattgtattagagtattaatatgcgcaatggtgtccttgcgtttctctgatagaatgcgagcagcgattttggcgttatcatttgacgatatttctggaatgacgaatcctgtttctactaactttttggtaggacaaagtgaaacaatcaagaagatagcttctcctcctatttgtggaagaaattgaactcctctagatgatctactgacgatagtatctccttgacagatattggaccgaattacagaagtacctggaatgtaaagccctgaaaccccctcattttttaagcagattgttgccgtaaatcctgcactgtgaccaagatagagagctcctttggtgaatccatctctatgtttcagtttaaccaagaaacagtcagctggtctaaaatttccatctctatctaatacagcatctaacttgatgtcaggaactatgaccggtttaatgttatatgtaacattgagtaaatccttaagttcataatcatcactgtcatcagttatgtacgatccaaacaatgtttctactggcatagtggatacgaagatgctatccatcagaatgtttccctgattagtattttctatatagctattcttctttaaacgattttccaaatcagtaactatgttcatttttttaggagtaggacgcctagccagtatggaagaggattttctagatcctctcttcaacatctttgatctcgatggaatgcaaaaccccatagtgaaacaaccaacgataaaaataatattgtttttcactttttataattttaccatctgactcatggattcattaatatctttataagagctactaacgtataattctttataactgaactgagatatatacaccggatctatggtttccataattgagtaaatgaatgctcggcaataactaatggcaaatgtatagaacaacgaaattatactagagttgttaaagttaatattttctatgagctgttccaataaattatttgttgtaactgcgttcaagtcataaatcatcttgatactatccagtaaaccgtgtttaagttctggaatattatcatcccattgtaaagcccctaattcgactatcgaatatcctgctctgatagcagtttcaatatcgacggacgtcaatactgtaataaaggtggtagtattgtcatcatcgtgataaactacgggaatatggtcgttagtaggtacggtgactttacacaacgcgatatataactttccttttgtaccatttttaacgtagttgggacgtcctgcagggtattgttttgaagaaatgatatcgagaacagatttgatacgatatttgttggattcctgattattcactataatataatctagacagatagatgattcgataaatagagaaggtatatcgttggtaggataatacatccccattccagtattctcggatactctattgatgacactagttaagaacatgtcttctattctagaaaacgaaaacatcctacatggactcattaaaacttctaacgctcctgattgtgtctcgaatgcctcgtacaaggatttcaaggatgccatagattctttgaccaacgatttagaattgcgtttagcatctgatttttttattaaatcgaatggtcggctctctggtttgctaccccaatgataacaatagtcttgtaaagataaaccgcaagaaaatttatacgcatccatccaaataaccctagcaccatcggatgatattaatgtattattatagattttccatccacaattattgggccagtatactgttagcaacggtatatcgaatagattactcatgtaacctactagaatgatagttcgtgtactagtcataatatctttaatccaatctaagaaatttaaaattagattttttacactgttaaagttaacaaaggtattacccggatacgtggatatcatatatggcattggtccattatcagtaatagctccataaactgatacggcgatggtttttatatgtgtttgatctaacgaggaagaaattcgcgcccacaattcatctctagatatgtatttaatatcaaacggtaacacatcaatttcgggacgcgtatatgtttctaaatttttaatccaaatataatgatgacctatatgccctattatcatactgtcaactatagtacacctagagaacttacgatacatctgtttcctataatcgttaaattttacaaatctataacatgctaaaccttttgacgacagccattcattaatttctgatatggaatctgtattctcgataccgtattgttctaaagccagtgctatatctccctgttcgtgggaacgctttcgtataatatcgatcaacggataatctgaagtttttggagaataatatgactcatgatctatttcgtccataaacaatctagacataggaattggaggcgatgatcttaattttgtgcaatgagtcgtcaatcctataacttctaatcttgtaatattcatcatcgacataatactatctatgttatcatcgtatattagtataccacggccttcttcatttcgtgccaaaataatatacagtcttaaataattacgcaatatctcaatagtttcataattgttagctgttttcatcaagatttgtaccctgtttaacatgatggcgttctatacgtctctattttcttttttttaaatttttaacgatttactgtggctagatacccaatctctctcaaatatttttttagcctcgcttacaagctgtttatctatactattaaaactgacgaatccgtgattttggtaatgggttccgtcgaaatttgccgaagtgatatgaacatattcgtcgtcgactatcaacaattttgtattattctgaatagtgaaaaccttcacagatagatcattttgaacacacaacgcgtctagacttctggcggttgccatagaatatacgtcgttcttatcccaattaccaactagaagtctgatcttaactcctctattaatggctgcttctataatggagttgtaaatgtcgggccaatagtagctattaccgtcgacacgtgtagtgggaactatggccaaatgttcaatatctatactagtcttagccgacttgagtttatcaataactacatcggtatctagatctctagaatatcccaataggtgttccggagaatcagtaaagaacactccacctataggattcttaatatgatacgcagtgctaactggcaaacaacaagccgcagagcataaattcaaccatgaattttttgcgctattaaaggctttaaaagtatcaaatcttctacgaagatctgtggccagcgggggataatcagaatatacacctaacgttttaatcgtatgtatagatcctccagtaaatgacgcgtttcctacataacatctttcatcatctgacacccaaaaacaaccgagtagtagtcccacattattttttttatctatattaacggttataaaatttatatccgggcagtgactttgtagctctcccagatttcttttccctcgttcatctagcaaaactattattttaatccctttttcagatgcctcttttagtttatcaaaaataagcgctcccctagtcgtactcagaggattacaacaaaaagatgctatgtatatatatttcttagctagagtgataatttcgttaaaacattcaaatgttgttaaatgatcggatctaaaatccatattttctggtagtgtttctaccagcctacattttgctcccgcaggtaccgatgcaaatggccacatttagttaacataaaaacttatacatcctgttctatcaacgattctagaatatcatcggctatatcgctaaaattttcatcaaagtcgacatcacaacctaactcagtcaatatattaagaagttccatgatgtcatcttcgtctatttctatatccgtatccattgtagattgttgaccgattatcgagtttaaatcattactaatactcaatccttcagaatacaatctgtgtttcattgtaaatttataggcggtgtatttaagttggtagattttcaattatgtatcaatatagcaacagtagttcttgctcctccttgattctagcatcctcttcattattttcttctacgtacataagcatgtccaatacgttagacaacacaccgacgatggcggccgccacagacacgaatatgactagaccgatgaccatttaaaaacccctctctagctttcacttaaactgtatcgattattcttttagaacatgtataatataaaaacattattctatttcgaatttaggcttccaaaaatttttcatccgtaaaccgataataatatatatagacttgttaatagtcggaataaatagattaatgcttaaactatcatcatctccacgattagagatacaatatttacattttttttgctgtttcgaaactttatcaatacacgttaatacaaacccaggaaggagatattgaaactgaggctgttgaaaatgaaacggtgaatacaataattcagataatgtaaaatcatgattccgtattctgatgatattagaactgctaatggatgtcgatggtatgtatctaggagtatctattttaacaaagcatcgatttgctaatatacaattatccttttgattaattgttattttattcatattcttaaaaggtttcatatttatcaattcttctacattaaaaatttccatttttaatttatgtagcccccgcaatactcctcattacgtttcattttttgtctataatatccattttgttcatctcggtacatagattatccaattgagaagcgcatttagtagttttgtacattttaagtttattgacgaatcgtcgaaaactagttatagttaacattttattatttgataccctgatattaatacccctgccgttactattatttataactgatgtaatccacgtaacattagaattaattatcgatagtaatgcatcgacgcttccaaaattgtctattataaactcaccgataatttttttattgcatgttttcatattcattaggattatcaaatctttaatcttactacgattgtatgcgttgatattgcaagacgtcattctaaaagacggaggatctccatcaaatgccagacaatcacgtacaaagtacatggaaataggttttgttctattgcgcatcatagatttatatagaacacccgtagaaatactaatttgttttactctataaaatactaatgcatctatttcatcgttttgtataacgtctttccaagtgtcaaattccaaatttttttcattgatagtaccaaattcttctatctctttaactacttgcatagataggtaattacagtgatgcctacatgccgttttttgaaactgaatagatgcgtctagaagcgatgctacgctagtcacaatcaccactttcatatttagaatatatgtatgtaaaaatatagtagaatttcattttgtttttttctatgctataaatgaattctcattttgcatctgctcatactccgttttatatcaataccaaagaaggaagatatctggttctaaaagccgttaaagtatgcgatgttagaactgtagaatgcgaaggaagtaaagcttcctgcgtactcaaagtagataaaccctcatcgcccgcgtgtgagagaagaccttcgtccccgtccagatgcgagagaatgaataaccctggaaaacaagttccgtttatgaggacggacatgctacaaaatatgttcgcggctaatcgcgacaacgtggcgtcgagacttttgaactaaaatacaattatatccttttcgatattaataaatccgtgtcgtccaggttttttatctctttcagtatgtgaatagataggtattttatctctattcatcatcgaatttaagagatccgataaacattgtttgtattctccagatgtcagcatctgatacaacaatatatgtgcacataaacctctggcacttatttcatgtaccttccccttatcactaaggagaatagtatttgagaaatatgtatacatgatattatcatgaattagatatacagaatttgtaacactctcgaaatcacacgatgtgtcggcgttaagatctaatatatcactcgataacacattttcatctagatacactagacattttttaaagctaaaatagtctttagtagtgacagtaactatgcgattattttcatcgatgatacatttcatcggcatattattacgcttaccatcaaagactataccatgtgtatatctaacgtattctagcatggttgccatacgcgcattaaacttttcaggatctttggatagatcttccaatctatctatttgagaaaacatttttatcatgttcaatagttgaaacgtcggatccactatatagatattatctataaagattttaggaactacgttcatggtatcctggcgaatattaaaactatcaatgatatgattatcgttttcatcttttatcaccatatagtttctaagatatgggattttacttaatataatattatttcccgtgataaattttattagaaaggccaaatctataagaaaagttctagaattagtctgaagaatatctatatcgccgtaccgtatatttggattaattagatatagagaatatgatccgtaacatatacaacttttattatggcgtctaagatattcttccatcaacttattaacatttttgactagggaagatacattatgacgtcccattacttttgccttgtctattactgcgacgttcatagaatttagcatatctcttgccaattcttccattgatgttacattataagaaattttagatgaaattacatttggagctttaatagtaagaactcctaatatgtccgtgtatgtggtcactaatacagattgtagttctataatcgtaaataatttacctatattatatgtttgagtctgtttagaaaagtagctaagtatacgatcttttatttctgatgcagatgtattaacatcggaaaaaaatctttttttattcttttttactaaagatacaaatatgtctttgttaaaaacagttattttttgaatatttctagcttgtaattttaacatatgatattcgttcacactaggtactctgcctaaataggtttctataatctttaatgtaatattaggaagagtattctgatcaggattcctattcattttgaggatttaaaactctgattattgtctaatatggtctctacgcaaactttttcacagagcgatagagtttttgataactcgtttttcttaagaaatataaaactactgtctccagagctcgctctatcttttattttatttaattcgatacaaactcctgatactggttcagaaagtaattcattaattttcagtcctttatagaagatatttaatatagataatacaaaattttcagttcttgatatcgatctgattgatcctagaactagatatattaataacgtgctcattaggcagtttatggcagcttgataattagatatagtatattccagttcatatttattagataccgcattgcccagattttgatattctatgaattcctctgaaaataaatccaaaataactaaacattctattttttgtggattagtgtactctcttccctctatcatgttcactactggtgtccacgatgataaatatctagagggaatataatatagtccataggatgccaatctagcaatgtcgaataactgtaatttgattcttcgttcttcattatgaattgattcttgaggtataaacctaacacaaattatattattagacttttcgtatgtaatgtctttcatgttataagtttttaatcctggaatagaatctattttaatgaggcttttaaacgcagagttctccaacgagtcaaagcataatactctgttgtttttcttatatacgatgttacgattttcttctttgaatggaataggtttttgaattagtttataattacaacataatagataaggaagtgtgcaaatagtacgcggaaaaaacataatagctcccctgttttcatccatggttttaagtaaatgatcactggcttctttagtcaatggatattcgaacattaaccgtttcatcatcattggacagaatccatatttcttaatgtaaagagtgatcaaatcattgtgtttattgtaccatcttgttgtaaatgtgtattcggttatcggatctgctcctttttctattaaagtatcgatgtcgatctcgtctaagaattcaactatatcgacatatttcatttgtatacacataaccattactaacgtagaatgtataggaagagatgtaacgggaacagggtttgttgattcgcaaactattctaatacataattcttctgttaatacgtcttgcacgtaatctattatagatgccaagatatctatataattattttgtaagatgatgttaactatgtgatctatataagtagtgtaataattcatgtatttcgatatatgttccaactctgtctttgtgatgtctagtttcgtaatatctatagcatcctcaaaaaatatattcgcatatattcccaagtcttcagttctatcttctaaaaaatcttcaacgtatggaatataataatctattttacctcttctgatatcattaatgatatagtttttgacactatcttctgtcaattgattcttattcactatatctaagaaacggatagcgtccctaggacgaactactgccattaatatctctattatagcttctggacataattcatctattataccagaattaatgggaactattccgtatctatctaacatagttttaagaaagtcagaatctaagacctgatgttcatatattggttcatacatgaaatgatctctattgatgatagtgactatttcattctctgaaaattggtaactcattctatatatgctttccttgttgatgaaggatagaatatactcaatagaatttgtaccaacaaactgttctcttatgaatcgtatatcatcatctgaaataatcatgtaaggcatacatttaacaattagagacttgtctcctgttatcaatatactattcttgtgataatttatgtgtgaggcaaatttgtccacgttctttaattttgttatagtagatatcaaatccaatggagctacagttcttggcttaaacagatatagtttttctggaacgaattctacaacattattataaaggactttgggtagataagtgggatgaaatcctattttaattaatgcgatagccttgtcctcgtgcagatatccaaacgcttttgtgatagtatggcattcattgtctagaaacgctctacgaatatctgtgacagatatcatctttagagaatatactagtcgcgttaatagtactacaatttgtattttttaatctatctcaataaaaaaattaatatgtatgattcaatgtataactaaactactaactgttattgataactagaatcagaatctaatgatgacgtaaccaagaagtttatctactgccaatttagctgcattatttttagcatctcgtttagattttccatctgccttatcgaatactcttccgtcgatgtctacacaggcataaaatgtaggagagttactaggccccactgattcaatacgaaaagaccaatctctcctagtaatttggcagtactcattaataacggtgacagggttagcacctttccaatcaataatttttttagccggaataacatcatcaaaagacttatgatcctctctcattgatttttcgcgggatacatcatctattatgacgtcagccatagcatcagcatccggcttatccgcctccgttgtcataaaccaacgaggaggaatatcgtcggagctgtacaccatagcactacgttgaagatcgtacagagctttattaacttctcgcttctccatattaagttgtctagttagttgtgcagcagtagctccttcgattccaatggttttaatagcctcacacacaatctctgcgttagaacgctcgtcgatatagattttagacatttttagagagaactaacgcaatcagtaataaaactaatttattttatcattttttttattcatcatcctctggtggttcgtcgtttctatcgaatgtagctctgattaacccgtcatctataggtgatgctggttctggagattctggaggagatggattattatctggaagaatctctgttatttccttgttttcatgtatcgattgcgttgtaacattaagattgcgaaatgctctaaatttgggaggcttaaagtgttgtttgcaatctctacacgcgtgtctaactagtggaggttcgtcagcggctctagtttgaatcatcatcggcgtagtattcctacttttacagttaggacacggtgtattgtatttctcgtcgagaacgttaaaataatcgttgtaactcacatcctttattttatctatattgtattctactcctttcttaatgcattttataccgaataagagatagcgaaggaattctttttcggtgccgctagtacccttaatcatatcacatagtgttttatattccaaatttgtggcaatagacggtttatttctatacgatagtttgtttctggaatcctttgagtattctataccaatattattctttgattcgaatttagtttcttcgatattagattttgtattacctatattcttgatgtagtactttgatgatttttccatggcccattctattaagtcttccaagttggcatcatccacatattgtgatagtaattctcggatatcagtagcggttaccgccattgatgtttgttcattggatgagtaactactaatgtatacattttccatttataacacttatgtattaactttgttcatttatattttttcattattatgttgatattaacaaaagtgaatatatatatgttaataattgtattgtggttatacggctacaattttataattagtgaaagtcagtgtccgatgatcaatgacgatagctttactctgaaaagaaagtatcaaatcgatagtgcggagtcaacaataaaaatggataagaagaggacaaagtttcagaatagagccaaaatggtaaaagaaataaatcagacaataagagcagcacaaactcattacgagacattgaaactaggatacataaaatttaagagaatgattaggactactactctagaagatatagcaccatctattccaaataatcagaaaacttataaactattctcggacatttcagccatcggcaaagcatcacggaatccaagtaagatggtatatgctctgctgctttacatgtttcccaatttgtttggagatgatcatagattcattcgttatagaatgcatccaatgagtaaaatcaaacacaagatcttctctcctttcaaacttaatcttattagaatattagtggaagaaagattctataataatgaatgcagatctaataaatggagaataattggaacacaagttgataaaatgttgatagctgaatctgataaatatacaatagatgcaaggtataacctaaaacccatgtatagaatcaagggaaaatctgaagaagataccctctttatcaaacagatggtagaacaatgtgtgacatcccaggaattggtggaaaaagtgttgaagatactgtttagagatttgttcaagagtggagaatacaaagcgtacagatacgatgatgatgtagaaaatggatttattggattggatacactaaaattaaacattgttcatgatatagttgaaccatgtatgcctgttcgtaggccagtggctaagatactgtgtaaagaaatggtaaataaatactttgagaatccgctacatattattggtaaaaatcttcaagagtgcattgactttgttagtgaataggcatttcatctttctccaatactaattcaaattgttaaattaataatggatagtataaatagttattagtgataaaatagtaaaaataattattagaataagagtgtagtatcatagataactctcttctataaaaatggattttattcgtagaaagtatcttatatacacagtagaaaataatatagattttttaaaggatgatacattaagtaaagtaaacaattttaccctcaatcatgtactagctctcaagtatctagttagcaattttcctcaacatgttattactaaggatgtattagctaataccaatttttttgttttcatacatatggtacgatgttgtaaagtgtacgaagcggttttacgacacgcatttgatgcacccacgttgtacgttaaagcattgactaagaattatttatcgtttagtaacacaatacaatcgtacaaggaaaccgtgcataaactaacacaagatgaaaaatttttagaggttgccaaatacatggacgaattaggagaacttataggcgtaaattatgacttagttcttaatccattatttcacggaggggaacccatcaaagatatggaaatcatttttttaaaactgtttaagaaaacagacttcaaagttgttaaaaaattaagtgttataagattacttatttgggcttacctaagcaagaaagatacaggcatagagtttgcggataatgatagacaagatatatatactctatttcaacaaactggtagaatcgtccatagcaatctaacagaaacgtttagagattatatctttcccggagataagactagctattgggtgtggttaaacgaaagtatagctaatgatgcggatattgttcttaatagacacgccattaccatgtatgataaaattcttagttatatatactctgagataaaacaaggacgcgttaataaaaacatgcttaagttagtttatatctttgagcctgaaaaagatatcagagaacttctgctagaaatcatatatgatattcctggagatatcctatctattattgatgcaaaaaacgacgattggaaaaaatattttattagtttttataaagctaattttattaacggtaatacatttattagtgatagaacgtttaacgaggacttattcagagttgttgttcaaatagatcccgaatatttcgataatgaacgaattatgtctttattctctacgagtgctgcggacattaaacgatttgatgagttagatattaataacagttatatatctaatataatttatgaggtgaacgatatcacattagatacaatggatgatatgaagaagtgtcaaatctttaacgaggatacgtcgtattatgttaaggaatacaatacatacctgtttttgcacgagtcggatcccatggtcatagagaacggaatactaaagaaactgtcatctataaaatccaagagtagacggctgaacttgtttagcaaaaacattttaaaatattatttagacggacaattggctcgtctaggtcttgtgttagatgattataaaggagacttgttagttaaaatgataaaccatcttaagtctgtggaggatgtatccgcattcgttcgattttctacagataaaaaccctagtattcttccatcgctaatcaaaactattttagctagttataatatttccatcatcgtcttatttcaaaggtttttaagagataatctatatcatgtagaagaattcttggataaaagcatccatctaaccaagacggataagaaatatatacttcaattgataagacacggtagatcatagaacagaccaaatatattattaataatttgtatatacatagatataattatcacatattaaaaattcacacatttttgataaatgggaactgctgcaacaattcagactcccaccaaattaatgaataaagaaaatgcagaaatgattttggaaaaaattgttgatcatatagttatgtatattagtgacgaatcaagtgattcagaaaataatcctgaatatattgattttcgtaacagatacgaagactatagatctctcattataaaaagtgatcacgagtttgtaaagctatgtaaaaatcatgcagagaaaagttctccagaaacgcaacaaatgattatcaaacacatatacgaacaatatcttattccagtatctgaagtactattaaaacctataatgtccatgggtgacataattacatataacggatgtaaagacaatgaatggatgctagaacaactctctaccctaaactttaacaatctccgcacatggaactcatgtagcataggcaatgtaacgcgtctgttttatacattttttagttatctgatgaaagataaactaaatatataagtataatcccattctaatactttaacctgatgtattagcatcttattagaatattaacctaactaaaagacataacataaaaactcattacatagttgataaaaagcggtaggatataaatattatggctgccaccgttccgcgttttgacgacgtgtacaaaaatgcacaaagaagaattctagatcaagaaacattttttagtagaggtctaagtagaccgttaatgaaaaacacatatctatttgataattacgcgtatggatggataccagaaactgcaatttggagtagtagatacgcaaacttagatgcaagtgactattatcccatttcgttgggattacttaaaaagttcgagtttctcatgtctctatataaaggtcctattccagtatacgaagaaaaagtaaatactgaattcattgctaatggatcgttctctggtagatacgtatcatatcttcgaaagttttctgctcttccaacaaacgagtttattagttttttgttactgacttccattccaatctataatatcttgttctggtttaaaaatactcagtttgatattactaaacacacattattcagatacgtctatacagataatgccaaacacctggcgttggctaggtatatgcatcaaacaggagactataagcctttgtttagtcgtctcaaagagaattatatatttaccggtcccgttccaataggtatcaaagatataaatcaccctaatcttagtagagcaagaagtccatccgattatgagacattagctaatattagtactatattgtactttaccaagtatgatccggtattaatgtttttattgttttacgtacctgggtattcaattactacaaaaattactccagccgtagaatatctaatggataaactgaatctaacaaagagcgacgtacaactgttgtaaattattttatgcttcgtaaaatgtaggttttgaaccaaacattctttcaaagaatgagatgcataaaactttattatccaatagattgactatttcggacgtcaatcgtttaaagtaaacttcgtaaaatattctttgatcactgccgagtttaaaacttctatcgataattgtttcatatgttttaatatttacaagttttttggtccatggtacattagccggacaaatatatgcaaaataatatcgttctccaagttctatagtttctggattatttttattatattcagtaaccaaatacatattagggttatctgcggatttataatttgagtgatgcattcgactcaacataaataattctagaggagacgatctactatcaaattcggatcgtaaatctgtttctaaagaacggagaatatctatacatacctgattagaattcatccgtccttcagacaacatctcagacagtctggtcttgtatgtcttaatcatattcttatgaaacttggaaacatctcttctagtttcactagtacctttattaattctctcaggtacagattttgaattcgacgatgccgagtatttcatcgttgtatatttcttcttcgattgcataatcagattcttatataccgcctcaaactctattttaaaattattaaacaatactctattattaatcagtcgttctaactcctttgctatttctatggacttatctacatcttgactgtctatctctgtaaacacggagtcggtatctccatacacgctacgaaaacgaaatctgtaatctataggcaacgatgttttcacaatcggattaatatctctatcgtccatataaaatggattacttaatggattggcaaaccgtaacataccgttagataactctgctccatttagtaccgattctagatacaagatcattctacgtcctatggatgtgcaactcttagccgaagcgtatgagtatagagcactatttctaaatcccatcagaccatatactgagttggctactatcttgtacgtatattgcatggaatcatagatggccttttcagttgaactggtagcctgttttaacatctttttatatctggctctctctgccaaaaatgttcttaatagtctaggaatggttccttctatcgatctatcgaaaattgctatttcagagatgaggttcggtagtctaggttcacaatgaaccgtaatatatctaggaggtggatatttctgaagcaagagctgattatttatttcttcttccaatctattggtactaacaacgacaccgactaatgtttccggagatagatttccaaagatacacacattaggatacagactgttataatcaaagattaatacattattactaaacattttttgttttggagcaaataccttaccgccttcataaggaaacttttgttttgtttctgatctaactaagatagttttagtttccaacaatagctttaacagtggacccttgatgactgtactcgctctatattcgaataccatggattgaggaagcacatatgttgacgcacccgcgtctgtttttgtttctactccataatactcccacaaatactgacacaaacaagcatcatgaatacagtatctagccatatctaaagctatgtttagattataatccttatacatctgagctaaatcaacgtcatcctttccgaaagataatttatatgtatcattaggtaaagtaggacataatagtacgactttaaatccattttcccaaatatctttacgaattactttacatataatatcctcatcaacagtcacataattacctgtggttaaaacctttgcaaatgcagcggctttgcctttcgcgtccgtagtatcgtcaccgatgaacgtcatttctctaactcctctatttaatactttacccatgcaactgaacgcgttcttggatatagaatccaatttgtacgaatccaatttttcagatttttgaatgaatgaatatagatcgaaaaatatagttccattattgttattaacgtgaaacgtagtattggccatgccgcctactcccttatgactagactgatttctctcataaatacagagatgtacagcttcctttttgtccggagatctaaagataatcttctctcctgttaataactctagacgattagtaatatatctcagatcaaagttatgtccgttaaaggtaacgacatagtcgaacgttagttccaacaattgtttagctattcgtaacaaaactatttcagaacataaaactagttctcgttcgtaatccatttccattagtgactgtatcctcaaacatcctctatcgacggcttcttgtatttcctgttccgttaacatctcttcattaatgagcgtaaacaataatcgtttaccacttaaatcgatataacagtaacttgtatgcgagattgggttaataaatacagaaggaaacttcttatcgaagtgacactctatatctagaaataagtacgatcttgggatatcgaatctaggtatttttttagcgaaacagttacgtggatcgtcacaatgataacatccattgttaatctttgtcaaatattgctcgtccaacgagtaacatccgtctggagatatcccgttagaaatataaaaccaactaatattgagaaattcatccatggtggcattttgtatgctgcgtttctttggctcttctatcaaccacatatctgcgacggagcattttctatctttaatatctagattataacttattgtctcgtcaatgtctatagttctcatctttcccaacggcctcgcattaaatggaggaggagacaatgactgatatatttcgtccgtcactacgtaataaaagtaatgaggaaatcgtataaatacggtctcaccatttcgacatctggatttcagatataaaaatctgttttcaccgtgactttcaaaccaattaatgcaccgaacatccatttatagaatttagaaatatattttcatttaaatgaatcccaaacattggggaagagccgtatggaccattatttttatagtactttcgcaagcgggtttagacggcaacatagaagcgtgtaaacgaaaactatatactatagttagcactcttccatgtcctgcatgtagacggcacgcgactatcgctatagaggacaataatgtcatgtctagcgatgatctgaattatatttattattttttcatcagattatttaacaatttggcatctgatcccaaatacgcgatcgatgtgacaaaggttaaccctttataaacttaacccattataaaacttatgattagtcacgactgaaataaccgcgtgattattttttggtataattctacacggcatggtttctgtgactatgaattcaacccccgttacattagtgaaatctttaacaaacagcaagggttcgtcaaagacataaaactcattgtttacaatcgaaatagaccccctatcacacttaaaataaaaaatatccttatcctttaccaccaaataaaattctgattggtcaatgtgaatgtattcacttaacagttccacaaatttatttattaactccgaggcacatacatcgtcggtattttttatggcaaactttactcttccagcatccgtttctaaaaaaatattaacgagttccatttatatcatccaatattattgaaatgacgttgatggacaaatgatacaaataagaaggtacggtacctttgtccaccatctcctccaattcatgctctattttgtcattaactttaatgtatgaaaacagtacgccacatgcttccatgacagtgtgtaacactttggatacaaaatgtttgacattagtataattgttcaagactgtcaatctataatagatagtagctataatatattctatgatggtattgaagaagatgacaaccttggcatattgatcatttaacacagacatggtatcaacagatagcttgaatgaaagagaatcagtaattggaataagcgtcttctcgatggagtgtccgtataccaacatgtctgatattttgatgtattccattaaattatttagttttttctttttattctcgttaaacagcatttctgtcaacggaccccaacatcgttgaccgattaagttttgattgatttttccgtgtaaggcgtatctagtcagatcgtatagcctatccaataatccatcgtctgtgtgtagatcacatcgtacactttttaattctctatagaagagcgacagacatctggagcaattacagacagcaatttctttattctctacagatgtaagatacttgaagacattcctatgatgatgcagaattttggataacacggtattgatggtatctgttaccataattcctttgatggctgatagtgtcagagcacaagatttccaatctttgacaatttttagcaccattatctttgttttgatatctatatcagacagcatggtgcgtctgacaacacaaggattaagacggaaagatgaaatgattctctcaacatcttcaatggataccttgctattttttctggcattatctatatgtgcgagaatatcctctagagaatcagtatcctttttgatgatagtggatctcaatgacatgggacgtctaaaccttcttattctatcaccagattgcatggtgatttgtcttctttcttttatcataatgtaatctctaaattcatcggcaaattgtctatatctaaaatcataatatgagatgtttacctctacaaatatctgttcgtccaatgttagagtatttacatcagttttgtattccaaattaaacatggcaacggatttaattttatattcctctattaagtcctcgtcgataataacagaatgtagataatcatttaatccatcgtacatggttggaagatgctcgttgacaaaatctttaattgtcttgatgaaggtgggactatatctaacatcttgattaataaaatttataacattgtccataggatactttgtaactagttttatacacatctcttcatcggtaagtttagacagaatatcgtgaacaggtggtatattatattcatcagatatacgaagaacaatgtccaaatctatattgtttaatatattatatagatgtagtgtagctcctacaggaatatctttaactaagtcaatgatttcatcaaccgttagatctattttaaagttaatcatataggcattgatttttaaaaggtatgtagccttgactacattctcattaattaaccattccaagtcactgtgtgtaagaagattatattctatcataagcttgactacatttggtcccgataccattaaagaattcttatgatataaggaaacagattttaggtactcatctactctacaagaattttggagagccttaacgatatcagtgacgtttattatttcaggaggaaaaaacctaacattgagaatatcggaattaatagcttccagatacagtgattttggcaatagtccgtgtaatccataatccagtaacacgagctggtgcttgctagacaccttttcaatgtttaatttttttgaaataagctttgataaagccttcctcgcaaattccggatacatgaacatgtcggcgacatgattaagtattgttttttcattatttttatattttctcaacaagttctcaataccccaatagatgatagaatatcacccaatgcgtccatgttgtctatttccaacaggtcgctatatccaccaatagaagttttcccaaaaaagattctaggaacagttctaccaccagtaatttgttcaaaatagtcacgcaattcattttcgggtttaaattctttaatatcgacaatttcatacgctcctcttttgaaactaaacttatttagaatatccagtgcatttctacaaaaaggacatgtatacttgacaaaaattgtcactttgttattggccaacctttgttgtacaaattcctcggccattttaatatttaagtgatataaaactatctcgacttatttaactctttagtcgagatatatggacgcagatagctatatgatagccaactacagaaggcaaacgctataaaaaacataattacgacgagcatatttataaatatttttattcagcattacttgatatagtaatattaggcacagtcaaacattcaaccactctcgatacattaactctctcattttctttaacaaattctgcaatatcttcgtaaaaagattcttgaaactttttagaatatctatcgactctagatgaaatagcgttcgtcaacatactatgttttgtatacataaaggcgcccattttaacagtttctagtgacaaaatgctagcgatcctaggatcctttagaatcacatagattgacgattcgtctctcttagtaactctagtaaaataatcatacaatctagtacgcgaaataatattatccttgacttgaggagatctaaacaatctagttttgagaacatcgataagttcatcgggaatgacatacatactatctttaatagaactcttttcatccagttgaatggattcgtccttaaccaactgattaatgagatcttctattttatcattttccagatgatatgtatgtccattaaagttaaattgtgtagcgcttctttttagtctagcagccaatactttaacatcactaatatcgatatacaaaggagatgatttatctatggtattaagaattcgtttttcgacatctgtcaaaaccaattcctttttgcctgtatcatccagttttccatcctttgtaaagaaattattttctactagactattaataagactgataaggattcctccataattgcacaatccaaactttttcacaaaactagactttacaagatctacaggaatgcgtacttcaggtttcttagcttgtgattttttcttttgtggacattttcttgtgaccaactcatctaccatttcattgattttagcagtgaaataagctttcaatgcacgggcactgatactattgaaaacgagttgatcttcaaattccgccatttaagttcaccaaacaacttttaaatacaaatatatcaatagtagtagaataagaactataaaaaaaataataattaaccaataccaaccccaacaaccggtattattagttgatgtgactgttttctcatcacttagaacagatttaacaatttctataaagtctgtcaaatcatcttccggagaccccataaatacaccaaatatagcggcgtacaacttatccatttatacattgaatattggcttttctttatcgctatcttcatcatattcatcatcaatatcaacaagtcccagattacgagccagatcttcttctacattttcagtcattgatacacgttcactatctccagagagtccgataacgttagccaccacttctctatcaatgattagtttcttgagtgcgaatgtaatttttgtttccgttccggatctatagaaaactacaggtgtgataattgccttggccaattgtctttctcttttactgagtgattctagttcaccttctatagatctgagaatggatgattctccagtcgaaacatattctaccatggctccgtttaatttgttgatgaagatggattcatccttaaatgttttctctgtaatagtttccaccgaaagactatgcaaagaatttggaatgcgttccttgtgcttaatgtttccatagacggcttctagaagttgatacaacataggactagccgcggtaacttttatttttagaaagtatccatcgcttctatcttgtttagatttatttttataaagtttagtctctccttccaacataataaaagtggaagtcatttgactagataaactatcagtaagttttatagagatagacgaacaattagcgtattgagaagcatttagtgtaacgtattcgatacattttgcattagatttactaatcgattttgcatactctataacacccgcacaagtctgtagagaatcgctagatgcagtaggtcttggtgaagtttcaactctcttcttgattaccttactcatgattaaacctaaataattgtactttgtaatataatgatatatattttcactttatctcatttgagaataaaaatgtttttgtttaaccactgcatgatgtacagatttcggaatcacaaaccaccggtggttttattttatccttgtccaatgtgaattgaatgggagcggatgcgggtttcgtacgtagatagtacattcccgtttttagaccgagactccatccgtaaaaatgcatactcgttagtttggaataactcggatctgctatatggatattcatagattgactttgatcgatgaaggctcccctgtctgcagccatttttatgatcgtcttttgtggaatttcccaaatagttttataaactcgcttaatatcttctggaaggtttgtattctgaatggatccaccatctgccataatcctattcttgatctcatcattccataattttctctcggttaaaactctaaggagatgcggattaactacttgaaattctccagacaatactctccgagtgtaaatattactggtatacggttccaccgactcattatttcccaaaatttgagcagttgatgcagtcggcataggtgccaccaataaactatttctaagaccgtatgttctgattttatcttttagaggttcccaattccaaagatccgacggtacaacattccaaagatcatattgtagaataccgttactggcgtacgatcctacatatgtatcgtatggtccttccttctcagctagttcacaactcgcctctaatgcaccgtaataaatggtttcgaagatcttcttatttagatcttgtgcttccaggctatcaaatggataatttaagagaataaacgcgtccgctaatccttgaacaccaataccgataggtctatgtctcttattagagatttcagcttctggaataggataataattaatatctataattttattgagatttctgacaattactttgaccacatccttcagtttgagaaaatcaaatcgcccatctattacaaacatgttcaaggcaacagatgccagattacaaacggctacctcattagcatccgcatattgtattatctcagtgcaaagattactacacttgatagttcctaaattttgttgattactctttttgttacacgcatccttataaagaatgaatggagtaccagtttcaatctgagattctataatcgctttccagacgactcgagcctttattatagatttgtatctcctttctctttcgtatagtgtatacaatcgttcgaactcgtctccccaaacattgtccaatccaggacattcatccggacacatcaacgaccactctccgtcatccttcactcgtttcataaagagatcaggaatccaaagagctataaatagatctctggttctatgttcctcgtttcctgtattctttttaagatcgaggaacgccataatatcagaatgccacggttccaagtatatggccataactccaggccgtttgtttcctccctgatctatgtatctagcggtgttattataaactctcaacattggaataataccgtttgatataccattggtaccggagatatagcttccactggcacgaatattactaattgatagacctattccccctgccattttagagattaatgcgcatcgttttaacgtgtcatagataccctctatgctatcatcgatcatgttaagtagaaaacagctagacatttggtgacgactagttcccgcattaaataaggtaggagaagcgtgcgtaaaccatttttcagaaagtagattgtacgtctcaatagctgagtctatatcccattgatgaattcctactgcgacacgcattaacatgtgctgaggtctttcaacgatcttgttgtttattttcaacaagtaggatttttccaaagttttaaaaccaaaatagttgtatgaaaagtctcgttcgtaaataataaccgagttgagtttatccttatatttgttaactatatccatggtgatacttgaaataatcggagaatgtttcccatttttaggattaacatagttgaataaatcctccatcacttcactaaatagtttttttgtttccttgtgtagatttgatacggctattctggcggctagaatggcataatccggatgttgtgtagtacaagtggctgctatttcggctgccagagtgtccaattctaccgttgttactccattatatattccttgaataaccttcatagctattttaataggatctatatgatccgtgtttaagccataacataattttctaatacgagacgtgattttatcaaacatgacattttccttgtatccatttcgtttaatgacaaacatttttgttggtgtaataaaaaaattatttaacttttcattaatagggatttgacgtacgtagcgtacaaaatgattgttcctggtatatagataaagagtcctatatatttgaaaatcgttacggctcgattaaactttaatgattgcatagtgaatatatcattaggatttaactccttgactatcagggcggcaccagaaattaccatcaaaagcattaatacagttatgcctatcgcagttagaacggttatagcatccaccatttatatctaaaaattagatcaaagaatatgtgacaaagtcctagttgtatattgagaattgacaaaacaatgtttcttacatattttttttttattagtaaccgacttaatagtaggaactggaaaactagacttgattattctataagtatagatacccttccaaataatattctctttgataaaagttccagaaaatgtagaattttttaaaaagttatcttttgctattaccaagattgtgtttagacgcttattattaatatgagtgatgaaatccacaccgcctctagatatcgcctttatttccacattagatggtaaatccaatagtgaaactatctttttaggaatgtatggactcgcgtttagaggagtgaacgtcttgggcgtcggaaaggatgattcgtcaaacgaataaacaatttcacaaatggatgttaatgtattagtaggaaattttttgacgctagtggaattgaaaattctaatggatgatgttctacctatttcatccgataacatgttaatttccgacaccaacggttttaatatttcgatgatatacggtagtctctctttcggacttatatagcttattccacaatacgagtcattatatactccaaaaaacaaaataactagtataaaatctgtatcgaatgggaaaaacgaaattatcgacataggtatagaatccggaacattgaacgtattaatacttaattctttttctgtggtaagtaccgataggttattgacattgtatggttttaaatattctataacttgagacttgatagatattagtgatgaattgaaaattatttttatcaccacgtgtgtttcaggatcatcgtcgacgcccgtcaaccaaccgaacggagtaaaataaatatcattaatatatgctctagatattagtatttttatcaatcctttgattatcatcttctcgtaggcgaatgattccatgatcaagagtgatttaagaacatcctccggagtattaatgggcttagtaaacagtccatcgttgcaataataaaagttatccaagttaaaggatattatgcattcgtttaaagatatcacctcatctgacggagacaattttttggtaggttttagagactttgaagctacttgtttaacaaagttattcatcgtcgtttactattctatttaattttgtagttaatttatcacatatcacattaattgactttttggtccatttttccatacgtttatattcttttaatcctgcgttatccgtttccgttatatccagtgatagatcgtgcaggttaaatagaatgctcttaaataatgtcatttttttatccgctaaaaatttaaagaatgtataaacttttttcaaagatttaaaacttttaggtggtgtcctagtacacaatatcataaacaaactaataaacatcccgcattcagattccaacagctgattaacttccacattaatacagcctattttcgctccaaatgtacattcgaaaaatctgaataaaacatcaatgtcgcaatttgtattatccaatacagaatgtttgtgattcgtgttaaaaccatcggagaaggaatagaaataaaaattattatagtggtggaattcagttggaatattgcctccggagtcataaaaggatactaaacattgttttttatcataaattacacatttccaatgagacaaataacaaaatccaaacattacaaatctagaggtagaacttttaattttgtctttaagtatatacgataagatatgtttattcataaacgcgtcaaatttttcatgaatcgctaaggagtttaagaatctcatgtcaaattgtcctatataatccacttcggatccataagcaaactgagagactaagttcttaatacttcgattgctcatccaggctcctctctcaggctctattttcatcttgacgacctttggattttcaccagtatgtattcctttacgtgataaatcatcgattttcaaatccatttgtgagaagtctatcgccttagatactttttcccgtagtcgaggtttaaagaaatacgctaacggtatactagtaggtaactcaaaaacatcatatatagaatggtaacgcgtctttaactcgtcggttaactctttcttttgatcgagttcgtcgctactattgggtctgctcaggtgccccgactctactagttccaacatcataccgataggaatacaagacactttgccggcggttgtagatttatcatatttttccactacatatccgttacaatttgttaaaaatttagatacatctatattgctacataatccagctagtgaatatatatgacataataaattggtaaatcctagttctggtattttactaattactaaatctgtatatctttccatttatcatggaaaagaatttaccagatatcttcttttttccaaactgcgttaatgtattctcttacaaatattcacaagatgaattcagtaatatgagtaaaacggaacgtgatagtttctcattggccgtgtttccagttataaaacatagatggcataacgcacacgttgtaaaacataaaggaatatacaaagttagtacagaagcacgtggaaaaaaagtatctcctccatcactaggaaaacccgcacacataaacctaaccgcgaagcaatatatatacagtgaacacacaataagctttgaatgttatagttttctaaaatgtataacaaatacagaaatcaattcgttcgatgagtatatattaagaggactattagaagctggtaatagtttacagatattttccaattccgtaggtaaacgaacagatactataggtgtactagggaataagtatccatttagcaaaattccattggcctcattaactcctaaagcacaacgagagatattttcagcgtggatttctcatagacctgtagttttaactggaggaactggagtgggtaagacgtcacaggtacccaagttattgctttggtttaattatttatttggtggattctctactctagataaaatcactaactttcacgaaagaccagtcattctatctcttcctaggatagctttagttagattgcatagcaataccattttaaaatcattgggatttaaggtactagatggatctcctatttctttacggtacggatctataccggaagaattaataaacaaacaaccaaaaaaatatggaattgtattttctacccataagttatctctaacaaaactatttagttatggcactcttattatagacgaagttcatgagcatgatcaaataggagatattattatagcagtagcgagaaagcatcatacgaaaatagattctatgtttttaatgactgccacgttagaggatgaccgagaacggctaaaagtatttttacctaatcccgcatttatacatattcctggagatacactgtttaaaattagcgaggtatttattcataataagataaatccatcttccagaatggcatacatagaagaagaaaagagaaatttagttactgctatacagatgtatactcctcctgatggatcatccggtatagtctttgtggcatccgttgcacagtgtcacgaatataaatcatatttagaaaaaagattaccgtatgatatgtatattattcatggtaaggtcttagatatagacgaaatattagaaaaagtgtattcatcacctaatgtatcgataattatttctactccttatttggaatccagcgttactatacgcaatgttacacacatttatgatatgggtaaagtttttgtccccgctccttttggaggatcgcaagaatttatttctaaatctatgagagatcaacgaaaaggaagagtaggaagagttaatcctggtacatacgtctatttctatgatctgtcttatatgaagtctatacagcgaatagattcagaatttctacataattatatattgtacgctaataagtttaatctaacactccccgaagatttgtttataatccctacaaatttggatattctatggcgtacaaaggaatatatagactcgttcgatattagtacagaaacatggaataaattattatccaattattatatgaagatgatagagtatgctaaactttatgtactaagtcctattctcgctgaggagttggataactttgagaggacgggagaattaactagtattgtacgagaagccattttatctctaaatttacgaattaagattttaaattttaaacataaagatgatgatacgtatatacacttttgtaaaatattattcggtgtctataacggaacaaacgctactatatattatcatagacctctaacgggatatatgaatatgatttcagatactatatttgttcctgtagataataactaaaaatcaaactctaatgaccacatctttttttagagatgaaaaattttctacatctccttttgtagacacgactaaacattttgcaaaaaaaagtttattagtgtttagataatcgtatacttcatcagtgtagatagtaaatgtgaacaaataaaaggtattcttactcaatagattggtaaattccatagaatatattaatcctttcttcttgagatcccacatcatttcaaccagagacgttttatccaatgatttacctcgtactataccacatacaaaactagattttgcagtgacgtcgtacctggtattcctaccaaacaaaattttacttttagttcttttagaaaattctaaggtagaatctctatttgccaatatgtcatctatggaattaccactagcaaaaaatgatagaaatatatattgatacatcgcagctggttttgatctactatactttaaaaacgaatcagattccataattgcctgtatatcatcagctgaaaaactatgttttacacgtattccttcggcatttctttttaatgatatatcttgtttagacaatgataaagttatcatgtccatgagagacgcgtctccgtatcgtataaatatttcattagatgttagacgcttcattaggggtatacttctataaggtttcttaatcagtccatcattggttgcgtcaagaactactatcggatgttgttgggtatctctagtgttacacatggccttactaaagtttgggtaaataactatgatatctctattaattatagatgcatatatttcattcgtcaaggatattagtatcgacttgctatcgtcattaatacgtgtaatgtaatcatataaatcatgcgatagccaaggaaaattcaaatagatgttcatcatataatcgtcgctataattcatattaatacgttgacattgactaatttgtaatatagcctcgccacgaagaaagctctcgtattcagtttcatcgataaaggataccgttaaatataactggttgccgatagtctcatagtctattaagtggtaagtttcgtacaaatacagaatccctaaaatattatctaatgttggattaatctttaccataactgtataaaatggagacggagtcataactattttaccgtttgtacttactggaatagacgaaggaataatctccggacatgctggtaaagacccaaatgtctgtttgaagaaatccaatgttccaggtcctaatctcttaacaaaaattacgatattcgatcccgatatcctttgcattctatttaccagcatatcacgaactatattaagattatctatcatgtctattctcccaccgttatataaatcgcctccgctaagaaacgttagtatatccatacaatggaatacttcatttctaaaatagtattcgttttctaattctttaatgtgaaatcgtatactagaaagggaaaaattatctttgagttttccgttagaaaagaaccacgaaactaatgttctgattgcgtccgattccgttgctgaattaatggatttacaccaaaaactcatataacttctagatgtagaagcattcgctaaaaaattagtagaatcaaaggatataagtagatgttccaacaagtgagcaattcccaagatttcatctatatcattctcgaatccgaaattagaaattcccaagtagatatcctttttcatccgatcgttgatgaaaatacgaactttattcggtaagacaatcatttactaaggagtaaaataggaagtaatgttcgtatgtcgttatcatcgtataaattaaaggtgtgttttttaccattaagtgacattataattttaccaatattggaattataatataggtgtatttgcgcactcgcgacggttgatgcatcggtaaatatagctgtatctaatgttctagtcggtatttcatcatttcgctgtctaataatagcgttttctctatctgtttccattacagctgcctgaagtttattggtcggataatatgtaaaataataagaaatacatacgaataacaaaaataaaataagatataataaagatgccatttagagatctaattttgttcaacttgtccaaattcctacttacagaagatgaggaatcgttggagatagtgtcttccttatgtagaggatttgaaatatcttatgatgacttgataacttactttccagataggaaataccataaatatatttctaaagtatttgaacatgtagatttatcggaggaattaagtatggaattccatgatacaactttgcgagatttagtctatcttagattgtacaagtattccaagtgtatacggccgtgttataaattaggagataatctaaaaggcatagttgttataaaggacaggaatatttatattagggaagcaaatgatgacttgatagaatatctcctcaaggaatacactcctcagatttatacatattctaatgagcgcgtccccataactggttcaaaattaattctttgtggattttctcaagttacatttatggcgtatacaacgtcgcatataacaacaaataaaaaggtagatgttctcgtttccaaaaaatgtatagatgaactagtcgatccaataaattatcaaatacttcaaaatttatttgataaaggaagcggaacaataaacaaaatactcaggaagatattttattcggtaacaggtggccaaactccataggtagctttttctatttcggattttagaatttccaaattcaccagcgatttatctgttttggtgaaatccaaggatttattaatgtccacaaatgccatttgttttgtctgtggattgtatttgaaaatggaaacgatgtagttagatagatgcgctgcgaagtttcctattagggttccgcgcttcacgtcacccagcatacttgaatcaccatcctttaaaaaaaatgataagatatcaacatggagtatatcatactcggattttaattcttctactgcatcactgacattttcacaaatactacaatacggtttaccgaaaataatcagtacgttcttcatttatgggtatcaaaaacttaaaatcgttactgctggaaaataaatcactgacgatattagatgataatttatacaaagtatacaatggaatatttgtggatacaatgagtatttatatagccgtcgccaattgtgtcagaaacttagaagagttaactacggtattcataaaatacgtaaacggatgggtaaaaaagggagggcatgtaaccctttttatcgatagaggaagtataaaaattaaacaagacgttagagacaagagacgtaaatattctaaattaaccaaggacagaaaaatgctagaattagaaaagtgtacatccgaaatacaaaatgttaccggatttatggaagaagaaataaaggcagaaatgcaattaaaaatcgataaactcacatttcaaatatatttatctgattctgataacataaaaatatcattgaatgagatactaacacatttcaacaataatgagaatgttacattattttattgtgatgaacgagacgcagaattcgttatgtgtctcgaggctaaaacacatttctctaccacaggagaatggccgttgataataagtaccgatcaggatactatgctatttgcatctgctgataatcatcctaagatgataaaaaacttaactcaactgtttaaatatgttccatctgcagaggataactatttagcaaaattaacggcgttagtgaatggatgtgatttctttcctggactctatggggcatctataacacccaacaacttaaacaaaatacaattgtttagtgattttacaatcgataatatagtcactagtttggcaattaaaaattattatagaaagactaactctaccgtagacgtgcgtaatattgttacgtttataaacgattacgctaatttagacgatgtctactcgtatattcctccttgtcaatgcactgttcaagaatttatattttccgcattagatgaaaaatggaatgaatttaaatcatcttatttagaaagcgtgccgttaccctgccaattaatgtatgcgttagaaccacgcaaggagattgatgtttcagaagttaaaactttatcatcttatatagatttcgaaaatactaaatcagatatcgatgttataaaatctatatcctcgatcttcggatattctaacgaaaactgtaacacgatagtattcggcatctataaggataatttactactgagtataaatagttcattttactttaacgatagtctgttaataaccaatactaaaagtgataatataataaatataggttactagattaaaaatggtgttccaactcgtgtgctctacgtgcggcaaagatatttctcacgaacgatataaattgattatacgaaaaaaatcattaaaggatgtactcgtcagtgtaaagaacgaatgttgtaggttaaaattatctacacaaatagaacctcaacgtaacttaacagtgcaacctctattggatataaactaatatggatccggttaattttatcaagacatatgcgcctagaggttctattatttttattaattataccatgtcattaacaagtcatttgaatccatcgatagaaaaacatgtgggtatttattatggtacgttattatcggaacacttggtagttgaatcaacatatagaaaaggagttcgaatagtcccattggatagtttttttgaaggatatcttagtgcaaaagtatacatgttagagaatattcaagttatgaaaatagcagctgatacgtcattaactttattgggtattccgtatggatttggtcatgatagaatgtattgttttaaattggtagctgactgttataaaaatgccggtattgatacatcgtctaaacgaatattaggtaaagatatttttctgagccaaaacttcacagacgataatagatggataaagatatatgattctaataatttaacattttggcaaattgattaccttaaagggtgagttaatatgcataactactcctccgttgttttttccctcgttctttttcttaacgttgtttgccatcactctcataatgtaaagatattctaaaatggtaaacttttgcatatcggacgcagaaattggtataaatgttgtaattgtattatttcccgtcaatggactagtcacagctccatcagttttatatcctttagagtatttctcactcgtgtctaacattctagagcattccatgatctgtttatcgttgatattggccggaaagatagattttttattttttattatattactattggcaattgtagatataacttctggtaaatatttttctaccttttcaatctcttctattttcaagccggctatatattctgctatattgttgctagtatcaataccttttctggctaagaagtcatatgtggtattcactatatcagttttaactggtagttccattagcctttccacttctgcagaataatcagaaattggttctttaccagaaaatccagctactataataggctcaccgatgatcattggcaaaatcctatattgtaccagattaatgagagcatatttcatttccaataattctgctagttcttgagacattgatttatttgatgaatctagttggttctctagatactctaccatttctgccgcatacaataacttgttagataaaatcagggttatcaaagtgtttagcgtggctagaatagtgggcttgcatgtattaaagaatgcggtagtatgagtaaaccgttttaacgaattatatagtctccagaaatctgtggcgttacatacatgagccgaatgacatcgaagattgtccaatatttttaatagctgctctttgtccattatttctatatttgactcgcaacaattgtagataccattaatcaccgattcctttttcgatgccggacaatagcacaattgtttagctttggactctatgtattcagaattaatagatatatctcttaatacagattgcactatacattttgaaactatgtcaaaaattgtagaacgacgctgttctgcagccatttaactttaaataatttacaaaaatttaaaatgagcatccgtataaaaatcgataaactgcgccaaattgtggcatatttttcagagttcagtgaagaagtatctataaatgtagactcgacggatgagttaatgtatatttttgccgccttgggcggatctgtaaacatttgggccattatacctctcagtgcatcagtgttctaccgcggagccgaaaatattgtgtttaatcttcctgtgtccaaggtaaaatcgtgtttgtgtagttttcacaatgatgccatcatagatatagaacctgatctggaaaataatctagtaaaactttctagttatcatgtagtaagtgtcgattgtaataaggaactgatgcctattaggacagatactactatttgtctaagtatagatcaaaagaaatcttacgtgtttaattttcacaagtatgaagaaaaatgttgtggtagaaccgtcattcatttagaatggttgttgggctttatcaagtgtattagtcagcatcagcatttggctattatgtttaaagatgacaatattattatgaagactcctggtaatactgatgcattttccagggaatattctatgactgaatgttctcaagaactacaaaagttttctttcaaaatagctatctcgtctctcaacaaactacgaggattcaaaaagagagtcaatgtttttgaaactagaatcgtaatggataatgacgataacattttaggaatgttgttttcggatagagttcaatcctttaagatcaacatctttatggcgtttttagattaatactttcaatgagataaatatgggtggcggagtaagtgttgagctccctaaacgggatccgcctccgggagtacccactgatgagatgttattaaacgtggataaaatgcatgacgtgatagctcccgctaagcttttagaatatgtgcatataggaccactagcaaaagataaagaggataaagtaaagaaaagatatccagagtttagattagtcaacacaggacccggtggtctttcggcattgttaagacaatcgtataatggaaccgcacccaattgctgtcgcacttttaatcgtactcattattggaagaaggatggaaagatatcagataagtatgaagagggtgcagtattagaatcgtgttggccagacgttcacgacaccggaaaatgcgatgttgatttattcgactggtgtcagggggatacgttcgatagaaacatatgccatcagtggatcggttcagcctttaataggagtaatagaactgtagagggtcaacaatcgttaataaatctgtataataagatgcaaacattatgtagtaaagatgctagtgtaccaatatgtgaatcatttttgcatcatttacgcgcacacaatacagaagatagcaaagagatgatcgattatattctaagacaacagtctgcggactttaaacagaaatatatgagatgtagttatcccactagagataagttagaagagtcattaaaatatgcggaacctcgagaatgttgggatccagagtgttcgaatgccaatgttaatttcttgctaacacgtaattataataatttaggactttgcaatattgtacgatgtaatactagcgtgaacaacttacagatggataaaacttcctcattaagattgtcatgtggattaagcaatagtgatagattttctactgttcccgtcaatagagcaaaagtagttcaacataatattaaacactcgttcgacctaaaattgcatttgatcagtttattatctctcttggtaatatggatactaattgtagctatttaaatgggtgccgcggcaagcatacagacgacggtgaatacactcagcgaacgtatctcgtctaaattagaacaagaagcgaatgctagtgctcaaacaaaatgtgatatagaaatcggaaatttttatatccgacaaaaccatggatgtaacctcactgttaaaaatatgtgctctgcggacgcggatgctcagttggatgctgtgttatcagccgctacagaaacatatagtggattaacaccggaacaaaaagcatacgtgccagctatgtttactgctgcgttaaacattcagacgagtgtaaacactgttgttagagattttgaaaattatgtgaaacagacttgtaattctagcgcggtcgtcgataacaaattaaagatacaaaacgtaatcatagatgaatgttacggagccccaggatctccaacaaatttggaatttattaatacaggatctagcaaaggaaattgtgccattaaggcgttgatgcaattgacgactaaggccactactcaaatagcacctaaacaagttgctggtacaggagttcagttttatatgattgttatcggtgttataatattggcagcgttgtttatgtactatgccaagcgtatgttgttcacatccaccaatgataaaatcaaacttattttagccaataaggaaaacgtccattggactacttacatggacacattctttagaacttctccgatggttattgctaccacggatatgcaaaactgaaaatatattgataatattttaatagattaacatggaagttatcactgatcgtctagacgatatagtgaaacaaaatatagcggatgaaaaatttgtagattttgttatacacggtctagagcatcaatgtcctgctatacttcgaccattaattaggttgtttattgatatactattatttgttatagtaatttatatttttacggtacgtctagtaagtagaaattatcaaatgttgttggcgttggtggcgctagtcatcacattaactattttttattactttatactataatagtactagactgacttctaacaaacatctcacctgccataaataaatgcttgatattaaagtcttctatttctaacactattccatctgtggaaaataatactctgacattatcgctaattgacacatcggtgagtgatatgcctataaagtaataatcttctttgggcacatataccagtgtaccaggttctaacaacctatttactggtgctcctatagcatactttttctttaccttgagaatatccatcgtttgcttggtcaatagcgatatgtgattttttatcaaccactcgaaaaagtaattggagtgttcatatcctctacgggctattgtctcatggccgtgtatgaaatttaagtaacacgactgtggtagatttgttctatagagccggttgccgcaaatagatagaactaccaatatgtctgtacaaatgttaaacattaattgattaacagaaaaaacaatgttcgttctgggaatagaaaccagatcaaaacaaaattcgttagaatatatgccacgtttatacattgaatataaaataactacagtttgaaaaataacagtatcatttaaacatttaacttgcggggttaatctcacaactttactgtttttgaactgttcaaaatatagcatagatccgtgagaaatacgtttagccgcctttaatagaggaaatcccaccgcctttctggatctcaccaacgacgatagttctgaccagcaactcatttcttcatcatccacctgttttaacatataataggcaggagatagatatccgtcattgcaatattccttctcgtaggcacacaatctaatattgataaaatctccattctcttctctgcatttattatcttgtttcggtggctgattaggctgtagtcttggtttaggctttggtatatcgttgttgaatctattttggtcattaaatctttcatttcttcctggtatatttttatcacctcgtttggttggatttttgtctatattatcgtttgtaacatcggtacgggtattcatttatcacaaaaaaaacttctctaaatgagtctactgctagaaaacctcatcgaagaagataccatattttttgcaggaagtatatctgagtatgatgatttacaaatggttattgccggcgcaaaatccaaatttccaagatctatgctttctatttttaatatagtacctagaacgatgtcaaaatatgagttggagttgattcataacgaaaatatcacaggagcaatgtttaccacaatgtataatataagaaacaatttgggtctaggagatgataaactaactattgaagccattgaaaactatttcttggatcctaacaatgaagttatgcctcttattattaataatacggatatgactgccgtcattcctaaaaaaagtggtaggagaaagaataagaacatggttatcttccgtcaaggatcatcacctatcttgtgtattttcgaaactcgtaaaaagattaatatttataaagaaaatatggaatccgcgtcgactgagtatacacctatcggagacaacaaggctttgatatctaaatatgcgggaattaatatcctaaatgtgtattctccttccacatccataagattgaatgccatttacggattcaccaataaaaataaactagagaaacttagtactaataaggaactagaatcgtatagttctagccctcttcaagaacccattaggttaaatgattttctgggactattggaatgtgttaaaaagaatattcctctaacagatattccgacaaaggattgattactataaatggagaatgttcctaatgtatactttaatcctgtgtttatagagcccacgtttaaacattctttattaagtgtttataaacacagattaatagttttatttgaagtattcgttgtattcattctaatatatgtattttttagatctgaattaaatatgttcttcatgcctaaacgaaaaatacccgatcctattgatagattacgacgtgctaatctagcgtgtgaagacgataaattaatgatctatggattaccatggatgacaactcaaacatctgcgttatcaataaatagtaaaccgatagtgtataaagattgtgcaaagcttttgcgatcaataaatggatcacaaccagtatctcttaacgatgttcttcgcagatgatgattcattttttaagtatttggctagtcaagatgatgaatcttcattatctgatatattgcaaatcactcaatatctagactttctgttattattattgatccaatcaaaaaataaattagaagccgtgggtcattgttatgaatctctttcagaggaatacagacaattgacaaaattcacagactttcaagattttaaaaaactgtttaacaaggtccctattgttacagatggaagggtcaaacttaataaaggatatttgttcgactttgtgattagtttgatgcgattcaaaaaagaatcctctctagctaccaccgcaatagatcctgttagatacatagatcctcgtcgtgatatcgcattttctaacgtgatggatatattaaagtcgaataaagtgaacaataattaattctttattgtcatcatgaacggcggacatattcagttgataatcggccccatgttttcaggtaaaagtacagaattaattagacgagttagacgttatcaaatagctcaatataaatgcgtgactataaaatattctaacgataatagatacggaacgggactatggacgcatgataagaataattttgaagcattggaagcaactaaactatgtgatgtcttggaatcaattacagatttctccgtgataggtatcgatgaaggacagttctttccagacattgtttaattctgtgagcgtatggcaaacggtaccgagctcggtttggaattagtgaaagcttaaaaattgaaattttattttttttttttggaatataaataagctcgaagtcgaccaccatgttcttggctgttttgtattgccttctgtggagtttccagatctctgatggccattttcctcgagcctgtgcctcctctaagaacttgttggcaaaagaatgctgcccaccatggatgggtgatgggagtccctgcggccagctttcaggcagaggttcctgccaggatatccttctgtccagtgcaccatctggacctcagttccccttcaaaggggtggatgaccgtgagtcctggccctctgtgttttataataggacctgccagtgctcaggcaacttcatgggtttcaactgcggaaactgtaagtttggatttgggggcccaaattgtacagagaagcgagtcttgattagaagaaacatttttgatttgagtgtctccgaaaagaataagttcttttcttacctcactttagcaaaacatactatcagctcagtctatgtcatccccacaggcacctatggccaaatgaacaatgggtcaacacccatgtttaatgatatcaacatctacgacctctttgtatggatgcattactatgtgtcaagggacacactgcttgggggctctgaaatatggagggacattgattttgcccatgaagcaccagggtttctgccttggcacagacttttcttgttattgtgggaacaagaaattcgagaactaactggggatgagaacttcactgttccatactgggattggagagatgcagaaaactgtgacatttgcacagatgagtacttgggaggtcgtcaccctgaaaatcctaacttactcagcccagcatccttcttctcctcctggcagatcatttgtagcagatcagaagagtataatagccatcaggttttatgcgatggaacacctgagggaccactattacgtaatcctggaaaccatgacaaagccaaaacccccaggctcccatcttcagcagatgtggaattttgtctgagtttgacccagtatgaatctggatcaatggatagaactgccaatttcagctttagaaacacactggaaggatttgccagtccactcacagggatagcagatccttctcaaagtagcatgcacaatgccttacatatctttatgaatggaacaatgtcccaagtacagggatcggccaacgatcccatttttcttcttcaccatgcttttgtggacagtatttttgaacaatggctgcgaaggcaccgccctcttttggaagtttacccagaagccaatgcacctatcggccataacagagactcttacatggttcctttcataccgctctatagaaatggtgatttcttcataacatccaaggatctgggatatgactacagctacctccaagagtcagatccaggcttttacagaaattatattgagccttacttggaacaagccagtcgtatctggccatggcttcttggggcagcactggtgggagctgttattgctgcagctctctctgggcttagcagtaggctatgccttcagaagaagaagaagaagaagcaaccccaggaggaaaggcagccactcctcatggacaaagacgactaccacagcttgctgtatcagagccatctgtgattaattaatttttatcgatctaattcaacaatgtctggagagctcggatccttctgtgagcgtatggcaaacgaaggaaaaatagttatagtagccgcactcgatgggacatttcaacgtaaaccgtttaataatattttgaatcttattccattatctgaaatggtggtaaaactaactgctgtgtgtatgaaatgctttaaggaggcttccttttctaaacgattgggtgaggaaaccgagatagagataataggaggtaatgatatgtatcaatcggtgtgtagaaagtgttacgtcggctcataatattatattttttatctaaaaaactaaaaataaacattgattaaattttaatataatacttaaaaatggatgttgtgtcgttagataaaccgtttatgtattttgaggaaattgataatgagttagattacgaaccagaaagtgcaaatgaggtcgcaaaaaaactgccgtatcaaggacagttaaaactattactaggagaattattttttcttagtaagttacagcgacacggtatattagatggtgccaccgtagtgtatataggatctgctcccggtacacatatacgttatttgagagatcatttctataatttaggagtgatcatcaaatggatgctaattgacggccgccatcatgatcctattttaaatggattgcgtgatgtgactctagtgactcggttcgttgatgaggaatatctacgatccatcaaaaaacaactgcatccttctaagattattttaatttctgatgtgagatccaaacgaggaggaaatgaacctagtacggcggatttactaagtaattacgctctacaaaatgtcatgattagtattttaaaccccgtggcgtctagtcttaaatggagatgcccgtttccagatcaatggatcaaggacttttatatcccacacggtaataaaatgttacaaccttttgctccttcatattcagctgaaatgagattattaagtatttataccggtgagaacatgagactgactcgagttaccaaatcagacgctgtaaattatgaaaaaaagatgtactaccttaataagatcgtccgtaacaaagtagttgttaactttgattatcctaatcaggaatatgactattttcacatgtactttatgctgaggaccgtgtactgcaataaaacatttcctactactaaagcaaaggtactatttctacaacaatctatatttcgtttcttaaatattccaacaacatcaactgaaaaagttagtcatgaaccaatacaacgtaaaatatctagcaaaaattctatgtctaaaaacagaaatagcaagagatccgtacgcagtaataaatagaaacgtactactgagatatactaccgatatagagtataatgatttagttactttaataaccgttagacataaaattgattctatgaaaactgtgtttcaggtatttaacgaatcatccataaattatactccggttgatgatgattatggagaaccaatcattataacatcgtatcttcaaaaaggtcataacaagtttcctgtaaattttctatacatagatgtggtaatatctgacttatttcctagctttgttagactagatactacagaaactaatatagttaatagtgtactacaaacaggcgatggtaaaaagactcttcgtcttcccaaaatgttagagacggaaatagttgtcaagattctctatcgccctaatataccattaaaaattgttagatttttccgcaataacatggtaactggagtagagatagccgatagatctgttatttcagtcgctgattaatcaattagtagagatgagataagaacattataataatcaataatatatcttatatctcgtttagaaaaatgctaatattaaaatagctaacgctagtaatccaatcggaagccatttgatatctataatagggtatctaatttcctgattcagatagcggacagctatattctcggtagctactcgtttggaatcacaaacattatttacatctaatttactatctgtaatggaaacgtttcccaatgaaatggtacaatccgatacattgcattttgttatatttttttttaaagaggctggtaacaacgcatcgcttcgtttacatggctcgtaccaacaataatagggtaatcttgtatctattcctatccgtactatgcttttatcaggataaatacatttacatcgtatatcgtctttgttagcatcacagaatgcataaatttgttcgtccgtcatgataaaaatttaaagtgtaaatataactattatttttatagttgtaataaaaagggaaatttgattgtataccttcggttctttaaaagaaactgacttgataaaaatggctgtaatctctaaggttacgtatagtctatatgatcaaaaagagattaatgctacagatattatcattagtcatgttaaaaatgacgacgatatcggtaccgttaaagatggtagactaggtgctatggatggggcattatgtaagacttgtgggaaaacggaattggaatgtttcggtcactggggtaaagtaagtatttataaaactcatatagttaagcctgaatttatttcagaaattattcgtttactgaatcatatatgtattcactgcggattattgcgttcacgagaaccgtattccgacgatattaacctaaaagagttatcgggacacgctcttaggagattaaaggataaaatattatccaagaaaaagtcatgttggaacagtgaatgtatgcaaccgtatcaaaaaattactttttcaaagaaaaaggtttgtttcgtcaacaagttggatgatattaacgttcctaattctctcatctatcaaaagttaatttctattcatgaaaagttttggccattattagaaattcatcaatatccagctaacttattttatacagactactttcccatccctccgttgattattagaccggctattagtttttggatagatagtatacccaaagaaaccaatgaattaacttacttattaggtatgatcgttaagaattgtaacttgaatgctgatgaacaggttatccagaaggcggtaatagaatacgatgatattaaaattatttctaataacacttccagtatcaatttatcatatattacatccggcaaaaataatatgattagaagttatatcgtcgcccgacgaaaagatcagacggctagatctgtaattggtcccagtacatctatcaccgttaatgaggtaggaatgcccgcatatattagaaatacacttacagaaaagatatttgttaatgcctttacagtggataaagttaaacaactattagcatcaaaccaagttaaattttactttaataaacgattaaaccaattaacaagaatacgccaaggaaagtttatcaaaaataaaatacatttattgcctggtgattgggtagaagtagctgttcaagaatatacaagtattatttttggaagacagccgtctctacatagatacaacgtcatcgcttcatctatcagagctaccgaaggagatactatcaaaatatctcccggaattgccaactctcaaaatgctgatttcgacggagatgaagaatggatgatattagaacaaaatcctaaagctgtaattgaacaaagtattcttatgtatccgacgacgttactcaaacacgatattcatggagcccccgtttatggatctattcaagatgaaatcgtagcagcgtattcattgtttaggatacaagatctttgtttagatgaagtattgaacatcttggggaaatatggaagagagttcgatcctaaaggtaaatgtaaattcagcggtaaagatatctatacttacttgataggtgaaaagattaattatccgggtctcttaaaggatggtgaaattattgcaaacgacgtagatagtaattttgttgtggctatgaggcatctgtcattggctggactcttatccgatcataagtcgaacgtggaaggtatcaactttattatcaagtcatcttatgtttttaagagatatctatctatttacggttttggggtgacattcaaagatctgagaccaaattcgacgttcactaataaattggaggccatcaacgtagaaaaaatagaacttatcaaagaagcatacgccaaatatctcaacgatgtaagagacgggaaaatagttccattatctaaagctttagaggcggactatgtggaatccatgttatccaacttgacaaatcttaatatccgagagatagaagaacatatgagacaaacgctgatagatgatccagataataacctcctgaaaatggccaaagcgggttataaagtaaatcctacagaactaatgtatattctaggtacgtatggacaacaaaggattgatggtgaaccagcagagactcgagtattgggtagagtcttaccttactatcttccagactctaaggatccagaaggaagaggttacattcttaattctttaacaaaaggattaacaggttctcaatattacttttcgatgctggttgcaagatctcaatctactgatatcgtctgtgaaacatcacgtaccggaacactggctagaaaaatcattaaaaagatggaggatatggtggtcgacggatacggacaagtagttataggtaatacgctcatcaagtacgccgccaattataccaaaattctaggctcagtatgtaaacctgtagatcttatctatccagatgagtccatgacttggtatttggaaattagtgctctgtggaataaaataaaacagggattcgtttactctcagaaacagaaacttgcaaagaagacattggcgccgtttaatttcctagtattcgtcaaacccaccactgaggataatgctattaaggttaaggatctgtacgatatgattcataacgtcattgatgatgtgagagagaaatacttctttacggtatctaatatagattttatggagtatatattcttgacgcatcttaatccttctagaattagaattacaaaagaaacggctatcactatctttgaaaagttctatgaaaaactcaattatactctaggtggtggaactcctattggaattatttctgcacaggtattgtctgagaagtttacacaacaagccctgtccagttttcacactactgaaaaaagtggtgccgtcaaacaaaaacttggtttcaacgagtttaataacttgactaatttgagtaagaataagaccgaaattatcactctggtatccgatgatatctctaaacttcaatctgttaagattaatttcgaatttgtatgtttgggagaattaaatccagacatcactcttcgaaaagaaacagataggtatgtagtagatataatagtcaatagattatacatcaagagagcagaaattaccgaattagtcgtcgaatatatgattgaacgattcatctcctttagcgtcattgtaaaggaatggggtatggaaacattcattgaggacgaggataatattagatttactgtctatctaaatttcgttgaaccagaggaattgaatcttagtaagtttatgatggttcttccgggggcagccaacaagggaaagattagtaaattcaagattcctatctctgattatacgggttatgacgacttcaatcaaacaaaaaagctcaataagatgactgtagaactcatgaatctaaaagaattaggttctttcgatttggaaaacgtcaacgtgtatcctggagtatggaatacatacgatatcttcggtatcgaggccgctcgtgaatacttgtgcgaagccatgttaaacacctatggagaagggttcgattatctgtatcagccttgtgatcttctcgctagtttactatgtgctagttacgaaccagaatcagtgaataaattcaagttcggcgcagctagtactcttaagagagctacgttcggagacaataaagcattgttaaacgcggctcttcataaaaagtcagaacctattaacgataatagtagctgccacttttttagcaaggtccctaatataggaactggatattacaaatactttatcgacttgggtcttctcatgagaatggaaaggaaactatctgataagatatcttctcaaaagatcaaggaaatggaagaaacagaagacttttaattcttatcaataacatatttttctatgatctgtcttttaaacgatggattttccacaaatgcgcctctcaagtccctcatagaatgatacacgtataaaaaatatagcataggcaatgactccttatttttagacattagatatgccaaaatcatagccccgcttctatttactcccgcagcacaatgaaccaacacgggctcgtttcgttgatcacatttagataaaaaggcggttacgtcgtcaaaatatttactaatatcggtagttgtatcatctaccaacggtatatgaataatattaatattagagttaggtaatgtatatttatccatcgtcaaatttaaaacatatttgaacttaacttcagatgatggtgcatccatagcatttttataatttcccaaatacacattattggttacccttgtcattatagtgggagatttggctctgtgcatatctccagttgaacgtagtagtaagtatttatacaaacttttcttatccatttataacgtacaaatggataaaactactttatcggtaaacgcgtgtaatttagaatacgttagagaaaaggctatagtaggcgtacaagcagccaaaacatcaacacttatattctttgttattatattggcaattagtgcgctattactctggtttcagacgtctgataatccagtctttaatgaattaacgagatatatgcgaattaaaaatacggttaacgattggaaatcattaacggatagcaaaacaaaattagaaagtgatagaggtagacttctagccgctggtaaggatgatatattcgaattcaaatgtgtggatttcggcgcctattttatagctatgcgattggataagaaaacatatctgccgcaagctattaggcgaggtactggagacgcgtggatggttaaaaaggcggcaaaggtcgatccatctgctcaacaattttgtcagtatttgataaaacacaagtctaataatgttattacttgtggtaatgagatgttaaatgaattaggttatagcggttattttatgtcaccgcattggtgttccgattttagtaatatggaatagtgttagataaatgcggtaacgaatgttcctgtaaggaaccataacagtttagatttaacgttaaagatgagcataaacataataaacaaaattacaatcaaacctataacattaatatcaaacaatccaaaaaatgaaatcagtggagtagtaaacgcgtacataactcctggataacgtttagtagctgccgttcctattctagaccaaaaattcggtttcatgttttcgaaacggtgttctgcaacaagtcggggatcgtgttctacatatttggcggcattatccagtatctgcctattgatcttcatttcgttttcaattctggctatttcaaaataaaatcccgatgatagacctccagactttataatttcatctacgatgttcagcgccgtagtaactctaataatataggctgataagctaacatcataccctcctgtatatgtgaatatggcatgatttttgtccattacaagctcggttttaactttattgcctgtaataatttctctcatctgtaggatatctatttttttgtcatgcattgccttcaagacgggacgaagaaacgtaatatcctcaataacgttatcgttttctacaataactacatattctacctttttattttctaactcggtaaaaaaattagaatcccatagggctaaatgtctagcgatatttcttttcgtttcctctgtacacatagtgttacaaaaccctgaaaagaagtgagtatacttgtcatcatttctaatgtttcctccagtccactgtataaacgcataatccttgtaatgatctggatcatccttgactaccacaacatttcttttttctggcataacttcgttgtcctttacatcatcgaacttctgatcattaatatgctcatgaacattaggaaatgtttctgatggaagtctatcaataactggcacaacaataacaggagttttcgccgccgccatttagttattgaaattaatcatatacaactctttaatacgagttatattttcgtctatccattgtttcacatttacatatttcgacaaaaagatataaaatgcgtattccaatgcttctctgtttaatgaattactaaaatatacaaacacgtcactgtctggcaataaatgatatcttagaatattgtaacaatttattttgtattgcacatgttcgtgatctatgagttcttcttcgaatggcataggatctccgaatctgaaaacgtataaataggagttagaataataatatttgagagtattggtaatatataaactctttagcggtataattagtttttttctctcaatttctatttttagatgtgatggaaaaatgactaattttgtagcattagtatcatgaactctaatcaaaatcttaatatcttcgtcacacgttagctctttgaagtttttaagagatgcatcagttggttcgaccgatggagtaggtgcaacaattttttgttcgatgtatgtatgtactggagccattgttttaactataatggtgcttgtatcgaaaaactttaatgcagatagcggaagctcttcgccgcgactttctacatcgtaattgggttctaacgccgatctctgaatggatactagttttctaagttctaatgtgattctctgaaaatgtaaatccaattcctccggcattatagatgtgtatacatcggtaaataaaactatagtatccaacgatcccttctcgcaaattctagtcttaaccaaaaaatcgtatataaccacggagatggcgtatttaagagtggattcttctaccgttttgttcttggatgtcatataggaaactataaagtccgcactactgttaagaatgattactaacgcaactatatagttcaaattaagcattttggaaacataaaataactctgtagacgatacttgactttcgaataagtttgcagacaaacgaagaaagaacagacctctcttaatttcagaagaaaactttttttcgtattcctgacgtctagagtttatatcaataagaaagttaagaattagtcggttaatgttgtatttcattacccaagtttgagatttcataatattatcaaaagacatgataatattaaagataaagcgctgactatgaacgaaatagctatatggttcgctcaaaaatatagtcttgttaaacgtggaaacgataactgtatttttaatcacgtcagcggcatctaaattaaatataggtatatttattccacacactctacaatatgccacaccatcttcataataaataaattcgttagcaaaattattaattttagtgaaatagttagcgtcaactttcatagcttccttcaatctaatttgatgctcacacggtgcgaattccactctaacatcccttttccatgcctcaggttcatcgatctctataatatctagttttttgcgtttcacaaacacaggctcgtctctcgcgatgagatctgtatagtaactatgtaaatgataactagatagaaagatgtagctatatagatgacgatcctttaagagaggtataataactttaccccaatcagatagactgttgttatggtcttcggaaaaagaatttttataaatttttccagtattttccaaatatacgtacttaacatctaaaaaatccttaatgataataggaatggataatccgtctattttataaagaaatacatatcgcacattatacttttttttggaaatgggaataccgatgtgtctacataaatatgcaaagtctaaatattttttagagaatcttaattggtccaaattcttttccaagtacggtaatagatttttcatattgaacggtatcttcttaatctctggttctagttccgcattaaatgatgaaactaagtcactatttttataactaacgattacatcacctctaacatcatcatttaccagaatactgatcttcttttgtcgtaaatacatgtctaatgtgttaaaaaaaagatcatacaagttatacgtcatttcatctgtggtattcttgtcattgaaggataaactcgtactaatctcttctttaacagcctgttcaaatttatatcctatatacgaaaaaatagcaaccagtgtttgatcatccgcgtcaatattctgttctatcgtagtgtataacaatcgtatatcttcttctgtgatagtcgatacgttataaaggttgataacgaaaatatttttatttcgtgaaataaagtcatcgtaggattttggacttatattcgcgtctagtagatatgcttttatttttggaatgatctcaattagaatagtctctttagagtccatttaaagttacaaacaactaggaaattggtttatgatgtataatttttttagtttttatagattctttattctatacttaaaaaatgaaaataaatacaaaggttcttgagggttgtgttaaattgaaagcgagaaataatcataaattatttcattatcgcgatatccgttaagtttgtatcgtaatggcgtggtcaattacaaataaagcggatactagtagcttcacaaagatggctgaaatcagagctcatctaaaaaatagcgctgaaaataaagataaaaacgaggatattttcccggaagatgtaataattccatctactaagcccaaaaccaaacgagccactactcctcgtaaaccagcggctactaaaagatcaaccaaaaaggaggaagtggaagaagaagtagttatagaggaatatcatcaaacaactgaaaaaaattctccatctcctggagtcagcgacattgtagaaagcgtggccgctgtagagctcgatgatagcgacggggatgatgaacctatggtacaagttgaagctggtaaagtaaatcatagtgctagaagcgatctctctgacctaaaggtggctaccgacaatatcgttaaagatcttaagaaaattattactagaatctctgcagtatcgacggttctagaggatgttcaagcagctggtatctctagacaatttacttctatgactaaagctattacaacactatctgatctagtcaccgagggaaaatctaaagttgttcgtaaaaaagttaaaacttgtaagaagtaaatgcgtgcacttttttataaagatggtaaactctttaccgataataattttttaaatcctgtatcagacgataatccagcgtatgaggttttgcaacatgttaaaattcctactcatttaacagatgtagtagtatatgaacaaacgtgggaggaggcgttaactagattaatttttgtgggaagtgattcaaaaggacgtagacaatacttttacggaaaaatgcatgtacagaatcgcaacgctaaaagagatcgtatttttgttagagtatataacgttatgaaacgaattaattgttttataaacaaaaatataaagaaatcgtccacagattccaattatcagttggcggtttttatgttaatggaaactatgttttttattagatttggtaaaatgaaatatcttaaggagaatgaaacagtagggttattaacactaaaaaataaacacatagaaataagtcccgatgaaatagttatcaagtttgtaggaaaggacaaagtttcacatgaatttgttgttcataagtctaatagactatataagccgctattgaaactgacggatgattctagtcccgaagaatttctgttcaacaaactaagtgaacgaaaggtatatgaatgtatcaaacagtttggtattagaatcaaggatctccgaacgtatggagtcaattatacgtttttatataatttttggacaaatgtaaagtccatatctcctcttccatcaccaaaaaagttaatagcgttaactatcaaacaaactgctgaagtggtaggtcatactccatcaatttcaaaaagagcttatatggcaacgactattttagaaatggtaaaggataaaaattttttagatgtagtatctaaaactacgttcgatgaattcctatctatagtcgtagatcacgttaaatcatctacggatggatgatatagatctttacacaaataattacaaaaccgataaatggaaatggataagcgtatgaaatctctcgcaatgaccgctttctttggggagctaagcacattagatattatggcattgataatgtctatatttaaacgccatccaaacaataccattttttcagtggataaggatggtcagtttatgattgatttcgaatacgataattataaggcttctcaatatttggatctgaccctcactccgatatctggagatgaatgcaagactcacgcatcgagtatagccgaacaattggcgtgtgtggatattattaaagaggatattagcgaatatatcaaaactactccccgtcttaaacgatttataaaaaaataccgcaatagatcagatactcgcatcagtcgagatacagaaaagcttaaaatagctctagctaaaggcatagattacgaatatataaaagacgcttgttaataagtaaatgaaaaaaaactagtcgtttataataaaacacgatatggatgccaacgtagtatcatcttctactattgcgacgtatatagacgctttagcgaagaatgcttcggaattagaacagaggtctaccgcatacgaaataaataatgaattggaactagtatttattaagccgccattgattactttgacaaatgtagtgaatatctctacgattcaggaatcgtttattcgatttaccgttactaataaggaaggtgttaaaattagaactaagattccattatctaaggtacatggtctagatgtaaaaaatgtacagttagtagatgctatagataacatagtttgggaaaagaaatcattagtgacggaaaatcgtcttcacaaagaatgcttgttgagactatcgacagaggaacgtcatatatttttggattacaagaaatatggatcctctatccgactagaattagtcaatcttattcaagcaaaaacaaaaaactttacgatagactttaagctaaaatattttctaggatccggtgcccagtctaaaagttctttattacacgctattaatcatccaaagtcaaggcctaatacatctctggaaatagaatttacacctagagacaatgaaacagttccatatgatgaactaataaaggaattgacgactctctcgcgtcatatatttatggcttctccagagaatgtaattctttctccgcctattaacgcgcctataaaaacctttatgttgcctaaacaagatatagtaggtttggatctggaaaatctatatgccgtaactaagactgacggcattcctataactatcagagttacatcaaacgggttgtattgttattttacacatcttggttatattattagatatcctgttaagagaataatagattccgaagtagtagtctttggtgaggcagttaaggataagaactggaccgtatatctcattaagctaatagagcctgtgaatgcaatcaatgatagactagaagaaagtaagtatgttgaatctaaactagtggatatttgtgatcggatagtattcaagtcaaagaaatacgaaggtccgtttactacaactagtgaagtcgtcgatatgttatctacatatttaccaaagcaaccagaaggtgttattctgttctattcaaagggacctaaatctaacattgattttaaaattaaaaaggaaaatactatagaccaaactgcaaatgtagtatttaggtacatgtccagtgaaccaattatctttggagagtcgtctatctttgtagagtataagaaatttagcaacgataaaggctttcctaaagaatatggttctggtaagattgtgttatataacggcgttaattatctaaataatatctattgtttggaatatattaatacacataatgaagtgggtattaagtccgtggttgtacctattaagtttatagcagaattcttagttaatggagaaatacttaaacctagaattgataaaaccatgaaatatattaactcagaagattattatggaaatcaacataatatcatagtcgaacatttaagagatcaaagcatcaaaataggagatatctttaacgaggataaactatcggatgtgggacatcaatacgccaataatgataaatttagattaaatccagaagttagttattttacgaataaacgaactagaggaccgttgggaattttatcaaactacgtcaagactcttcttatttctatgtattgttccaaaacatttttagacgattccaacaaacgaaaggtattggcgattgattttggaaacggtgctgacctggaaaaatacttttatggagagattgcgttattggtagcgacggatccggatgctgatgctatagctagaggaaatgaaagatacaacaaattaaactctggaattaaaaccaagtactacaaatttgactacattcaggaaactattcgatccgatacatttgtctctagtgtcagagaagtattctattttggaaagtttaatatcatcgactggcagtttgctatccattattcttttcatccgagacattatgctaccgtcatgaataacttatccgaactaactgcttctggaggcaaggtattaatcactaccatggacggagacaaattatcaaaattaacagataaaaagacttttataattcataagaatttacctagtagcgaaaactatatgtctgtagaaaaaatagctgatgatagaatagtggtatataatccatcaacaatgtctactccaatgactgaatacattatcaaaaagaacgatatagtcagagtgtttaacgaatacggatttgttcttgtagataacgttgatttcgctacaattatagaacgaagtaaaaagtttattaatggcgcatctacaatggaagatagaccatctacaagaaactttttcgaactaaatagaggagccattaaatgtgaaggtttagatgtcgaagacttacttagttactatgttgtttatgtcttttctaagcggtaaataataatatggtatgggttctgatctcccagttctaaatgcattaaataattccaatagagcgatttttgttcctataggaccttccaactgtggatactctgtattgttaatagatatattaatacttttgtcgggtaacagaggttctacgtcttttaaaaataaaagtttgataacatctggcctgttcataaataaaaacttggcgattctatatatactcttattatcaaatctagccattgtcttatagatgtgagctactgtaggtgtaccatttgattttctttctaatactatatatttctctcgaagaagttcttgcacatcatctgggaataaaatactactgttgagtaaatcagttattttttttatatcgatattgatggacatttttatagttaaggataataagtatcccaaagtagataacgacgataacgaagtatttatacttttaggaaatcacaatgactttatcagattaaaattaacaaaattaaaggagcatgtatttttttctgaatatattgtgactccagatacatatggatctttatgcgtcgaattaaatgggtctagttttcagcacggcggtagatatatagaggtggaggaatttatagatgctggaagacaagttagatggtgttctacatccaatcatatatctaaagatatacccgaagatatgcacactgataaatttgtcatttatgatatatacacttttgacgctttcaagaataaacgattggtattcgtacaggtacctccgtcgttaggagatgatagtcatttgactaatccgttattgtctccgtattatcgtaattcagtagccagacaaatggtcaatgatatgatttttaatcaagattcatttttaaaatatttattagaacatctgattagaagccactatagagtttctaaacatataacaatagttagatacaaggataccgaagaattaaatctaacgagaatatgttataatagagataagtttaaggcgtttgtattcgcttggtttaacggcgtttcggaaaatgaaaaggtactagatacgtataaaaaggtatctaatttgatataatgaattcagtgactgtatcacacgcgccatatactattacttatcacgatgattgggaaccagtaatgagtcaattggtagagttttataacgaagtagccagttggctgctacgagacgagacgtcgcctattcctgataagttctttatacagttgaaacaaccgcttagaaataaacgagtatgtgtgtgcggtatagatccgtatccgaaagatggaactggtgtaccgttcgaatcaccaaattttacaaaaaaatcaattaaggagatagcttcatctatatctagattaaccggagtaattgattataaaggttataaccttaatataatagacggggttataccctggaattattacttaagttgtaaattaggagaaacaaaaagtcacgcgatctactgggataagatttccaagttactgctgcagcatataactaaacacgttagtgttctttattgtttgggtaaaacagatttctcgaatatacgggccaagttagaatccccggtaactaccatagtcggatatcatccagcggctagagaccgccaattcgagaaagatagatcatttgaaattatcaacgttttactggaattagacaacaaggcacctataaattgggctcaagggtttatttattaatgctttagtgaaattttaacttgtgttctaaatggatgcggctattagaggtaatgatgttatctttgttcttaagactataggtgtcccgtcagcgtgcagacaaaatgaagatccaagatttgtagaagcatttaaatgcgacgagttagaaagatatattgagaataatccagaatgtacactattcgaaagtcttagggatgaggaagcatactctatagtcagaattttcatggatgtagatttagacgcgtgtctagacgaaatagattatttaacggctattcaagattttattatcgaggtgtcaaactgtgtagctagattcgcgtttacagaatgcggcgccattcatgaaaatgtaataaaatccatgagatctaatttttcattgactaagtctacaaatagagataaaacaagttttcatattatctttttagacacgtataccactatggatacattgatagctatgaaacgaacactattagaattaagtagatcatctgaaaatccactaacaagatcgatagacactgccgtatataggagaaaaacaactcttcgggttgtaggtactaggaaaaatccaaattgcgacactattcatgtaatgcaaccaccgcatgataatatagaagattacctattcacttacgtggatatgaacaacaatagttattacttttctctacaacaacgattggaggatttagttcctgataagttatgggaaccagggtttatttcattcgaagacgctataaaaagagtttcaaaaatattcattaattctataataaactttaatgatctcgatgaaaataattttacaacggtaccactggtcatagattacgtaacaccttgtgcattatgtaaaaaacgatcgcataaacatccgcatcaactatcgttggaaaatggtgctattagaatttacaaaactggtaatccacatagttgtaaagttaaaattgttccgttggatggtaataaactgtttaatattgcacaaagaattttagacactaactctgttttattaaccgaacgaggagaccatatagtttggattaataattcatggaaatttaacagcgaagaacccttgataacaaaactaattttgtcaataagacatcaactacctaaggaatattcaagcgaattactctgtccaagaaaacgaaagactgtagaagctaacatacgagacatgttagtagattcagtagagaccgatacctatccggataaacttccgtttaaaaatggtgtattggacctggtagacggaatgttttactctggagatgatgctaaaaaatatacgtgtactgtatcaaccggatttaaatttgacgatacaaagttcgtcgaagacagtccagaaatggaagagttaatgaatatcattaacgatatccaaccattaacggatgaaaataagaaaaatagagagctatatgaaaaaacattatctagttgtttatgcggtgctaccaaaggatgtttaacattcttttttggagaaactgcaactggaaagtcgacaaccaaacgtttgttaaagtctgctatcggtgacctgtttgttgagacgggtcaaacaattttaacagatgtattggataaaggacctaatccatttatcgctaacatgcatttgaaaagatctgtattctgtagcgaactacctgattttgcctgtagtggatcaaagaaaattagatctgacaatattaaaaagttgacagaaccttgtgtcattggaagaccgtgtttctccaataaaattaataatagaaaccatgcgacaatcattatcgatactaattacaaacctgtttttgataggatagataacgcattaatgagaagaattgccgtcgtgcgattcagaacacacttttctcaaccttctggtagagaggctgctgaaaataatgacgcgtacgataaagtcaaactattagacgaggggttagatggtaaaatacaaaataatagatatagattcgcatttctatacttgttggtgaaatggtacagaaaatatcatgttcctattatgaaactatatcctacacccgaagagattcctgactttgcattctatctcaaaataggtactctgttagtatctagctctgtaaagcatattccattaatgacggacctctccaaaaagggatatatattgtacgataatgtggtcactcttccgttgactactttccaacagaaaatatccaagtattttaattctagactatttggacacgatatagagagcttcatcaatagacataagaaatttgccaatgttagtgatgaatatctgcaatatatattcatagaggatatttcatctccgtaaatatatgctcatatatttatagaagatatcacatatctaaatgaataccggaatcatagatttatttgataatcatgttgatagtataccaactatattacctcatcagttagctactctagattatctagttagaactatcatagatgagaacagaagcgtgttattgttccatattatgggatcaggtaaaacaataatcgctttgttgttcgccttggtagcttccagatttaaaaaggtttacattctagtgcctaatatcaacattttgaaaatttttaattataatatgggtgtagctatgaacttgtttaatgacgaattcatagctgagaatatctttattcattccacaacaagtttttattctcttaattataacgataacgtcattaattataacggattatctcgctacaataactctatttttatcgttgatgaggcacataatatctttgggaataatactggagaacttatgaccgtgataaaaaataaaaacaagattccttttctactattgtctggatctcccattactaacacacctaatactctgggtcatattatagatttaatgtccgaagagacgatagattttggtgagattattagtcgtggtaagaaagtaattcagacacttcttaacgaacgcggtgtgaatgtacttaaggatttgcttaaaggaagaatatcatattacgaaatgcctgataaagatctaccaacgataagatatcacggacgtaagtttctagatactagagtagtatattgtcacatgtctaaacttcaagagagagattatatgattactagacgacagctatgttatcatgaaatgtttgataaaaatatgtataacgtgtcaatggcagtattgggacaacttaatctgatgaataatttagatactttatttcaggaacaggataaggaattgtacccaaatctgaaaataaataatggcgtgttatacggagaagaattggtaacgttaaacattagttccaaatttaaatactttattaatcggatacagacactcaacggaaaacattttatatacttttctaattctacatatggcggattggtaattaaatatatcatgctcagtaatggatattctgaatataatggttctcagggaactaatccacatatgataaacggcaaaccaaaaacatttgctatcgttactagtaaaatgaaatcgtctttagaggatctattagatgtgtataattctcctgaaaacgatgatggtagtcaattgatgtttttgttttcgtcaaacattatgtccgaatcctatactctgaaagaggtaaggcatatttggtttatgactatcccagatactttttctcaatacaaccaaattcttggacgatctattagaaaattctcttacgccgatatttctgaaccagttaatgtatatcttttagccgccgtatattccgatttcaatgacgaagtaacgtcattaaacgattacacacaggatgaattgattaatgttttaccatttgacatcaaaaagctgttatatctaaaatttaagactaaagaaacgaatagaatatactctattcttcaagagatgtctgaaacgtattctcttccaccacatccatcaattgtaaaagttttattgggagaattggtcagacaatttttttataataattctcgtattaagtataacgactccaagttacttaaaatggttacatcagttataaaaaataaagaagacgctaggaattacatagatgatattgtaaacggtcacttctttgtatcgaataaagtatttgataaatctcttttatacaaatacgaaaacgatattattacagtaccgtttagactttcctacgaaccatttgtttggggagttaactttcgtaaagaatataacgtggtatcttctccataaaactgatgaaatatataaagaaataaatgtcgagctttgttaccaatggataccttccagttacattggaaccacacgagctgacgttagacataaaaactaatattaggaatgccgtatataagacgtatctccatagagaaattagtggtaaaatggccaagaaaatagaaattcgtgaagacgtggaattacctctcggcgaaatagttaataattctgtagttataaacgttccgtgtgtaataacctacgcgtattatcacgttggggatatagtcagaggaacattaaacatcgaagatgaatcaaatgtaactattcaatgtggagatttaatctgtaaactaagtagagattcgggtactgtatcatttagcgattcaaagtactgcttttttcgaaatggtaatgcgtatgacaatggcagcgaagtcactgccgttctaatggaggctcaacaaggtatcgaatctagttttgtttttctcgcgaatatcgtcgactcataaaaaagagaatagcggtaagtataaacacgaatactatggcaataattgcgaatgttttattctcttcgatatatttttgataatatgaaaaacatgtctctctcaaatcggacaaccatctcataaaatagttctcgcgcgctggagaggtagttgctgctcgtataatctccccagaataatatacttgcgtgtcgtcgttcaatttatacggatttctatagttctctgttatataatgcggttttccatcatgattagacgacgacaatagtgttctgaatttagatagttgatcagaatgaatgtttattggcgttggaaaaattatccatacagcgtctgcagagtggttgatagttgttcctagatatgtaaaataatccaacttactaggcagcaaattgtctagataaaatactgaatcaaacggtgcagacgtattggcggatctaatggaatccaattgattaactatcttttgaaaatatacatttttatgatccaatacttgtaagaatatagaaataatgataagtccatcatcgtgtttttttgcctcttcataagaactatattttttcttattccaatgaacaagattaatctctccagagtatttgtacacatctatcaagtgattggatccataatcgtcttcctttccccaatatatatgtagtgatgataacacatattcattggggagaaaccctccacttatatatcctcctttaaaattaatccttactagttttccagtgttctggatagtggttggtttcgactcattataatgtatgtctaacggcttcaatcgcgcgttagaaattgcttttttagtttctatattaataggagatagttgttgcggcatagtaaaaatgaaatgataactgtttaaaaatagctcttagtatgggaattacaatggatgaggaagtgatatttgaaactcctagagaattaatatctattaaacgaataaaagatattccaagatcaaaagacacgcacgtgtttgctgcgtgtataacaagtgacggatatccgttaataggagctagaagaacttcattcgcgttccaggcgatattatctcaacaaaattcagattctatctttagagtatccactaaactattacggtttatgtactacaatgaactaagagaaatctttagacggttgagaaaaggttctatcaacaatatcgatcctcactttgaagagttaatattattgggtggtaaactagataaaaaggaatctattaaagattgtttaagaagagaattaaaagaggaaagtgatgaacgtataacagtaaaagaattcggaaatgtaattctaaaacttacaacgcgcgataaattatttaataaagtatatataggttattgcatggcgtgttttattaatcaatcgttggaggatttatcgcatactagtatttacaatgtagaaattagaaagattaaatcattaaatgattgtattaacgacgataaatacgaatatctgtcttatatttataatatgctagttaatagtaaatgaacttttacagatctagtataattagtcagattattaagtataatagacgactagctaagtctattatttgcgaggatgactctcaaattattacactcacggcattcgttaaccaatgcctatggtgtcataaacgagtatccgtgtccgctattttattaactactgataacaaaatattagtatgtaacagacgagatagttttctctattctgaaataattagaactagaaacatgtttagaaagaaacgattatttctgaattattccaattatttgaacaaacaggaaagaagtatactatcgtcatttttttctctagatccagctactgctgataatgatagaatagacgctatttatccgggtggcatacccaaaaggggtgagaatgttccagagtgtttatccagggaaattaaagaagaagttaatatagacaattcttttgtattcatagacactcggttttttattcatggcatcatagaagataccattattaataaattttttgaggtaatcttctttgtcggaagaatatctctaacgagtgatcaaatcattgatacatttaaaagtaatcatgaaatcaaggatctaatatttttagatccgaattcaggtaatggactccaatacgaaattgcaaaatatgctctagatactgcaaaactcaaatgttatggccatagaggatgttattacgaatcattaaaaaaattaactgaggatgattgattagaaaatataaattaatttaccatcgtgtatttttataacgggattgtccggcatatcatgtagatagttaccgtctacatcgtatactcgaccatctacgcctttaaatcctctatttattgacattaatctattagaattggaataccaaatattagtaccctcaattagtttattggtaatatttttgttagacgatagatcgatggctcttgaaaccaaggttttccaaccggactcattgtcgatcggtgagaagtctttttcattagcatgaatccattctaatgatgtatgtttaaacactctaaacaattggacaaattcttttgatttgctttgaatgatttcaaataggtcttcgtctacagtaggcataccattagataatctagccattataaagtgcacgtttacatatctacgttctggaggagtaagaacgtgactattgagacgaatggctcttcctactatctgacgaagagacgcctcgttccatgtcatatctaaaatgaagatatcattgattgagaagaagctaataccctcgcctccactagaagagaatacgcatgttttaatgcattctccgttagtgtttgattcttggttaaactcagccaccgccttgattctagtatcttttgttctagatgagaactctatattagagataccaaagactttgaaatatagtaataagatttctattcctgactgattaacaaatggttcaaagactagacatttaccatgggatgctaatattcccaaacatacatctataaatttgacgcttttctcttttaattcagtaaatagagagatatcagccgcactagcatcccctcccaatagttctccccttttaaaggtatctaatgcagatttagaaaattctctatctcttaatgaatttttaaaatcattatatagtgttgctatctcttgcgcgtattcgcccggatcacgattttgtctttcaggaaagctatcgaacgtaaacgtagtagccatacgtctcagaattctaaatgatgatatacctgtttttatttcagcgagtttagccttttgataaatttcttcttgctttttcgacatattaacgtatcgcattaatactgttttcttagcgaatgatgcagacccttctacgtcatcaaaaatagaaaactcgttattaactatgtacgaacataggcctcctagtttggagactaattctttttcatcaactagacgtttattctcaaatagcgattggtgttgtaaggatcctggtcgtagtaagttaaccaacatggtgaattcttgcacactattgacgataggtgtagccgataaacaaatcatcttatggttttttaatgcgatggtcttagataaaaaattatatactgaacgagtaggacggatcttaccatcttctttgattaatgatttagaaatgaagttatgacattcatcaataatgacgcatattctactcttggaattaatagttttgatattagtaaaaaatttatttctaaaattttgatcatcgtaattaataaaaatacaatccttcgttatctctggagcgtatctgagtatagtgttcatccaaggatcttctatcaaagcctttttcaccaataagataatagcccaattcgtataaatatccttaagatgtttgagaatatatacagtagtcattgttttaccgacacccgtttcatggaacaataaaagagaatgcatactgtctaatcctaagaaaactcttgctacaaaatgttgataatccttgaggcgtactacgtccgaccccatcatttcaacaggcatattagtagttctgcgcaatgcataatcgatataggccgcgtgtgatttactcatttatgagtgataagtaataactatgttttaaaaatcacagcagtagtttaactagtcttctctgatgtttgttttcgatactttttgaatcagaagtcatactagaataaagcaacgagtgaacgtaatagagagcttcgtatactctattcgaaaactctaagaacttattaatgaattccgtatccactggattgtttaaaatactaaattgaacactgttcacatccttccaagaagaagacttagtgacggacttaacatgagacataaataaatccaaattttttttacaaacatcactagccaccataatggcgctatcttttaaccagctatcgcttacgcattttagcagtctaacatttttaaagagactacaatatattctcatagtatcgattacacctctaccgaataaagttggaagtttaataatacaatatttttcgtttacaaaatcaaataatggtcgaaacacgtcgaaggttaacatcttataatcgctaatgtatagattgttttcagtgagatgattattagatttaatagcatctcgttcacgtttgaacagtttattgcgtgcgctgaggtcggcaactacggcgtccgctttagtactcctcccataatactttacgctattaatctttaaaatttcatagactttatctagatcgctttctggtaacatgatatcatgtgtaaaaagttttaacatgtcggtcggcattctatttagatcattaactctagaaatctgaagaaagtaattagctccgtattccagactaggtaatgggcttttacctagagacagattaagttctggcaatgtttcataaaatggaagaaggacatgcgttccctcccggatattttttacaatttcatccatttacaactctatagtttgttttcattattattagttattatctcccataatcttggtaatacttaccccttgatcgtaagataccttatacaggtcattacatacaactaccaattgtttttgtacataatagattggatggttgacatccatggtggaataaactactcgaacagatagtttatctttccccctagatacattagccgtaatagttgtcggcctaaagaatatctttggtgtaaagttaaaagttagggttcttgttccattattgctttttgtcagtagttcattataaattctcgagatgggtccgttctctgaatatagaacatcatttccaaatctaacttctagtctagaaataatatcggtcttattcttaaaatctattcccttgatgaagggatcgttaatgaacaaatccttggcctttgattcggctgatctattatctccgttatagacgttacgttgactagtccaaagacttacaggaatagatgtatcgatgatgttgatactatgtgatatgtgagcaaagattgttctcttagtggcatcactatatgttccagtaatggcggaaaactttttagaaatgttatatataaaagaattttttcgtgttccaaacattagcagattagtatgaagataaacactcatattatcaggaacattatcaatttttacatacacatcagcatcttgaatagaaacgataccatcttctggaacctctacgatctcggcagactccggataaccagtcggtggaccatcgctaacaataactagatcatccaacaatctactcacatatgcatctatataatctttttcatcttgtgagtaccctggatacgaaataaatttattatccgtatttccataataaggtttagtataaacagagagcgatgttgccgcatgaacttcagttacagtcgccgttggttggtttatttgacctattactctcctaggtttctctataaatgatggtttaatttgtacattcttaaccatatatccaataaagctcaattcaggaacataaacaaattctttgttgaacgtttcaaagtcgaacgaagagtcacgaataacgatatcggatactggattgaaggttaccgttacggtaatttttgaatcggatagtttaagactgctgaatgtatcttccacatcaaacggagttttaatataaacgtatactgtagatggttctttaatagtgtcattaggagttaggccaatagaaatatcattaagttcactagaatatccagagtgtttcaaagcaattgtattattgatacaattattatataattcttcgccctcaatttcccaaataacaccgttacacgaagagatagatacgtgattaatacatttatatccaacatatggtacgtaaccgaatcttcccatacctttaacttctggaagttccaaactcagaaccaaatgattaagcgcagtaatatactgatccctaatttcgaagctagcgatagcctgattgtctggaccatcgtttgtcataactccggatagagaaatatattgcggcatatataaagttggaatttgactatcgactgcgaagacattagaccgtttaatagagtcatccccaccgatcaaagaattaatgatagtattattcattttctatttaaaatggaaaaagcttacaataaactccgtagagaaatatctataatttgtgagttttccttaaagtaacagcttccgtaaacgccgtctttatctcttagtaagtttattgtatttataaccttttccttatcttcatagaatactaaaggcaacaaagaaatttttggttcttctctaagagctacgtgagacttaaccatagacgccaacgaatccctacatattttagaacagaaatacccaacttcaccacccttgaatgtctcaatactaataggtttaaaaaccaaatcttgattacaaaaccaacacttatcaattacactatttgtcttaatagacacatctgccatagatttataatactttggtagtatacaagcgagtgcttcttctttagcgggcttaaagactgctttaggtgctgaaataaccacatctggaaggcttactcgcttagccatttaattacggaactatttttttatacttctaatgagcaagtagaaaacctctcatctacaaaaacatactcgtgtccataatcctctaccatagttacacgttttttagatctcatatgtgctaaaaagttttcccatactaattggttactattatttttcgtataatttttaacagtttgaggttttagatttttagttacagaagtgatatcgaatattttatccaaaaagaatgaataattaattgtcttagaaggagtgttttcttggcaaaagaataccaagtgcttaaatatttctactacttcattaatcttttctgtactcagattcagtttctcatcttttacttgattgattatttcaaagactaacttataatcctttttatttattctctcgttagccttaagaaaactagatacaaaatttgcatctacatcatccgtggatatttgatttttttccatgatatccaagagttccgagataatttctccagaacattgatgagacaataatctccgcaatacatttctcaaatgaataagtttattagacacatggaagtttgactttttttgtacctttgtacatttttgaaataccgactcgcaaaaaatacaatattcatatccttgttcagatactataccgttgtgtctacaaccgctacataatcgtagattcatgttaacactctacgtatctcgtcgtccaatattttatataaaaacattttatttctagacgttgccagaaaatcctgtaatatttttagttttttgggctgtgaataaagtatcgccctaatattgttaccgtcttccgccaatatagtagttaaattatccgcacatgcaaaagaacaccgcttaggcggattcagtacaatgttatatttttcgtaccaactcatttaaatatcataatctaaaatagttctgtaatatgtctagcgctaatatattgatcataatcctgtgcataaattaagatacaacaatgtctcgaaatcatcgacatggcttcttccatagttagaagatcgtcgtcaaagttagcaacgtgattcatcaacatttgctgttttgaggcagcaaatactgaaccgtcgccattcaaccattcataaaaaccatcgtctgaatccattgataatttcttgtactggtttttgagagctcgcatcaatctagcatttctagctcccggattgaaaacagaaagaggatcgtacatccagggtccattttctgtaaatagaatcgtataatgtcccttcaagaagatatcagacgatccacaatcaaagaattggtctccgagtttgtaacaaactgcggactttaacctatacatgataccgtttagcatgatttctggtgatacgtcaatcggagtatcatctattagagatctaaagccggtgtaacattctccaccaaacatattcttattctgacgtcgttctacataaaacatcattgctccattaacgataacaggggaatgaacagcactacccatcacattagttcccaatggatcaatgtgtgtaactccagaacatcttccatatcctatgttaggaggagcgaacaccactcttccactattgccatcgaatgccatagaataaatatccttggaattgatagaaatcggactgtcggatgttgtgatcatcttcataggattaacaactatgtatggtgccgcctgaagtttcatatcgtaactgatgccgtttataggtctagccacagaaaccaacgtaggtctaaatccaactatagacaaaatagaagccaatatctgttcctcatctgtcataacttgagagcatccagtatgaataatcttcattagatggggatctaccgcatcatcatcgttacaataaaaaattcccattctaatgttcataattgcttttctaatcatggtatgcatgtttgctctctgaatctctgtggaaattagatctgatacacctgtaatcactatcggattatcctccgtaagacgattaaccaacaacatataattataagactttacttttctaaattcataaagttgctggattaggctataggtgtctccatgtacatacgcgttctcgagcgcaggaagtttaataccgaatagtgccatcagaataggatgaatatagtaattagtttctggttttctataaataaaagacaaatcttgtgaactagacatatcggtaaaatgcatggattggaatcgtgtagtcgacagaagaatatgatgattagatggagagtatattttatctaactctttgagttggtcaccgattctaggactagctcgagaatgaataagtactaaaggatgagtacatttcacagaaacactagcattgttcaatgtgctctttacatgggtaaggagttgaaatagctcgtttctatttgttctgacaatatttagtttattcataatgttaagcatatcctgaatagtaaagttagatgtgtcatacttgttagtagttagatatttagcaattgcattcccatcatttctcaatctcgtactccaatcatgtgtagatgctacttcgtcgatggaaaccatacaatcctttttgataggctgttgagattgattatttcctgcacgtttaggtttggtacgttgatttctagcccctgcggatataaagtcatcgtctacaatttgggacaatgaattgcatacactacaagacaaagatttatcagaagtgtgaatatgatcttcatctaccaaagaaagagtttgattagtataactagattttagtcctgcgttagatgttaaaaaaacatcgctattgaccacggcttccattatttatattcgtagtttttactcgaaagcgtgattttaatatccaatcttattacttttggaatcgttcaaaacctttgactagttgtagaatttgatctattgccctacgcgtatactcccttgcatcatatacgttcgtcaccagatcgtttgtttcggcctgaagttggtgcatatctctttcaacattcgacatgagatccttaagggccatatcgtctagattttgttgagatgctgctcctggatttggattttgttgtgctgttgtacatactgtaccaccagtaggtgtaggagtacatacagtggccacaataggaggttgaggaggtgtaaccgttggagtagtacaagaaatatttccatccgattgttgtgtacatgtagttgttggtaacgtctgagaaggttgggtagatggcggtgtcgtcgtcttttgatctttattaaatttagagataatatcctgaacagcattgctcggcgtcaacgctggaaggagtgaactcgccggcgcatcagtatcttcagacagccaatcaaaaagattagacatatcagatgatgtattagtttgttgtcgtggttttggtgtaggaacagtactactaggtagaagaataggagccggtgtagctgttggaaccggctgtggagttatatgaatagttggttgtagcggttggataggctgtctgctggcgaccgtcatattatctctagctagttgttctcgcaactgtctttgataatacgactcttgagactttagtcctatttcaatcgcttcatcctttttcgtatccggatccttttcttcagaataatagattgacgactttggtgtagaggattctgccagcccctgtgagaacttgttaaagaagtccatttaaggctttaaaattgaattgcgattataagattaaatggcagacacagacgatattatcgactatgaatccgatgatctcaccgaatacgaggatgatgaagaagaggaagaagatggagagtcactagaaactagtgatatagatcccaaatcttcttataagattgtagaatcagcatccactcatatagaagatgcgcattccaatcttaaacatatagggaatcatatatctgctcttaaacgacgctatactagacgtataagtctatttgaaatagcgggtataatagcagaaagctataacttgcttcaacgaggaagattacctctagtttcagaattttctgacgaaacgatgaagcaaaatatgctacatgtaattatacaagagatagaggagggttcttgtcctatagtcatcgaaaagaacggagaattgttgtcggtaaacgattttgacaaagatggtctaaaattccatctagactatattatcaaaatttggaaacttcaaaaacgatattagaatttatacgaatatcgttctctaaatgtcacaatcaagtctcgcatgttcagcaatttattgtcgtactttatatcgtgttcattaacgatatcttgcaaaatagtaatgattctatcttccttcgatagatattcttcagagattattgtcttatattttttcttgttatccgatatgaatttgataagactttgaacattattgatacccgtctgtttaattttttctacagatattttagttttggcagattctatcgtatctgtcaatagacatccaacatcgacattcgacgtcaattgtctataaatcaacgtataaattttagaaataacattagcgaattgttgtgcattgatgtcgttattctgaaacagtatgattttaggtagcattttcttaacaaagagaacgtatttattgttactcagttgaacagatgatatatccagattactaacgcatctgattccgtataccaaactttcagaagaaatggtgtacaattgtttgtattcattcaatgtctctttttcagaaattagtttagagtcgaatactgcaataattttcaagagatagttttcatcagataagattttatttagtgtagatatgataaaactattgttttgttggagaacttgatacgccgcgttctctgtagtcgacgctctcaaatgggaaacaatctccattatttttttggaatcggatactatatcttcggtatcttgacgcagtctagtatacatagagttaagagagattagagtttgtacattaagcaacatgtctctaaatgtggctacaaacttttcctttttcacataatctagtttattatataccgatttcacaacggcaccagatttaaggaaccagaatgaaaaactctgataactacaatatttcatcatagttacgattttatcatcttctatagttggtgtaatagcgcatacctttttctccaagactggaaccaacgtcataaaaatgtttaaatcaaaatccatatcaacatctgatgcgctaagaccagtctcgcgttcaagattatctttactaatggtgacgaactcatcatatagaactctaagtttgtccattatttatttacagatttagttgtttaatttatttgtgctcttccagagttgggatagtatttttctaacgtcggtattatattattaggatctacgttcatatgtatcataatattaatcatccacgttttgataaatctatctttagcttctgaaataacgtatttaaacaaaggagaaaaatatttagctacggcatcagacgcaataacattttttgtaaatgtaacgtatttagacgacagatcttcgttaaaaagttttccatctatgtagaatccatcggttgttaacaccattcccgcgtcagattgaataggagtttgaatagtttgttttggaaatagatccttcaataacttatagttgggtgggaaaaaatcgattttatcactagactctttcttttttactatcattacctcatgaactatttcttgaatgagtatatgtattttctttcctatatcggacgcgttcattggaaaatataccatgtcgttaactataagaatatttttatcctcgtttacaaactgaataatatcagatgtagttcgtaaacgaactatatcatcaccagcacaacatctaactatatgatatccactagtttcctttagccgtttattatcttgttccatattagcagtcattccatcatttaagaaggcgtcaaagataatagggagaaatgacattttggattctgttacgactttaccaaaattaaggatatacggacttactatctttttctcaacgtcgatttgatgaacacacgatgaaaatgtgcttctatgagattgatcatgtagaaaacaacaagggatacaatatttccgcatatcatgaaatatattaagaaatcccaccttattatatttccccaaaggatccatgcatgtaaacattatgccgttatcattaataaagacttctttctcatcggatttgtaaaagttgttactgatttttttcattccaggatctagataattaataatgatgggttttctattcttattctttgtattttggcatatcctagaccagtaaacagtttccactttggtaaaatcagcagacttttgaacgctattaaacatggcattaatggcaataactaaaaatgtaaaatatttttctatgttaggaatatggtttttcactttaatagatatatggtttttggccaaaatgatagatatttttttatccgaggatagtaaaatattattagtcgccgtctctataaaaatgaagctagtctcgatatccaattttattctagaattgataggagtcgccaaatgtaccttatacgttatatctcccttgatgcgttccatttgtgtatctatatcggacacaagatctgtaaatagttttacgttattaatcatcacggtatcgccgtcgctagataacgctaatgtaccatccaagtcccaaatggagagatttaactgttcatcgtttagaataaaatgattaccggtcatattaataaagtgttcatcgtatctagataacaacgacttataattaatgtccaagtcttgaactcgctgaatgatcttttttaacccagttagttttagattggtacgaaatatattgttaaactttgattctacagtaatgtccaaatctagttgtggaaatacttccatcaacattgtttcaaacttgataatattattatctacatcttcatacgatccaaattccggaatagatgtatcacatgctcttgccacccagataaccaaaaagtcacacgctccaggatatacattgtataaaaagctatcgttttttagtagtgtttttttctgagtatatacgaagggattaaaaatagtattatcaacgtaactatattccaaattattcttatgagaatagataataatatcgtccttaatatctaacaaatttcctaaatatccctttaattgagtcattcgaagcgtcaatagaatatgtctcttaactatttccggctgttgtatatttaaatgacttcgtaaaaaataatatatgggcgacttctcatctatgtaatcatatggagtgagatatagggctcgttctacctcctgccccttacccacctgtaataccaattgcggacttactatatatcgcatatttatatcgtggggtaaagtgaaaatctactaccgatgatgtaagtcttacaatgttcgaaccagtaccagatcttaatttggaggcctccgtagaactaggggaggtaaatatagatcaaacaacacctatgataaaggaaaatagcggttttatatcccgtagtagacgtctattcgcccatagatctaaggatgatgagagaaaactagcactacgattctttttacaaagactttattttttagatcatagagagattcattatttgttcagatgcgttgacgctgtaaaagacgtcactattaccaaaaaaaataacattatcgtggcgccttatatagcacttttaactatcgcatcaaaaggatgcaaacttacagaaacaatgattgaagcattttttccagaactatataatgaacatagtaagaaatttaaattcaactctcaagtatccatcatccaagaaaaactcggataccagtttggaaactatcacgtttatgattttgaaccgtattactctacagtagctctggctattcgagatgaacattcatctggcatttttaatatccgtcaagagagttatctggtaagttcattatctgaaataacatatagattttatctaattaatctaaaatctgatcttgttcaatggagtgctagtacgggcgctgtaattaatcaaatggtaaatactgtattgattacagtgtatgaaaagttacaactggtcatagaaaatgattcacaatttacatgttcattggctgtggaatcaaaacttccaataaaattacttaaagatagaaatgaattatttacaaaattcattaacgagttaaaaaagaccagttcattcaagataagcaaacgcgataaggatacgctactaaaatattttacttaggactggagttagaatttatagacgactcatttcgtttatcattgttactattattactattactatcattattagtgttggcattattagtattcttcttgtcatcttgttcagaaatatacagcaatgctatacctaatactaaatacattatcatgctcgcaatggctctaacaacaacgaaccaaaatgaatttggtcgtagcttttgttcacaaaaatacataaagaaatgtctacataaatctatggcgccattggctacttgaaatagcgccagtcctcctacagattttaatatagctgtataacatgacatttattcatcatcaaaagagacagagtcaccatctgtcatatttagattttttttcatgtgttcaaagtatcctctactcatttcattataatagtttatcatacttagaattttaggacggatcaatgagtaagacttgactagatcgtcagtagtaatttgtgcatcgtctattctgcatccgcttcgtcgaataatgtatagcatcgctttgagattctccatagctatcaagtctttatacaatgacatggaaatatctgtgaatactttatacttctccaacatcgatgccttaacatcatcgcctactttagcattgaaaatacgttctattgtgtagatggatgtagcaagatttttaaacaacaatgccatcttacacgatgattgcctcaagtctccaatcttttgtttagaacgattagctacagagttcaacgcttggctgactagcatattattatctttagaaattgtattcttcaatgaggcgtttatcatatctgtgatttcgttagtcatattacagtctgactgggttgtaatgttatccaacatatcacctatggatacggtacacgtaccagcatttgtaataatcctatctaagatgttgtatggcattgcgcagaaaatatcttctcctgtaatatctccactctcgataaatctactcagattattcttaaatgccttattctctggagaaaagatatcagtgtccatcatttcattaatagtatacgcagaaaagataccacgagtatcaattctatccaagatacttatcggttccgagtcacagataatggtttcctctccttcgggagatcctgcatagaaatatctaggacaatagtttctatactgtctgtaactctgataatctctaaagtcactaactgataccatgaaattgagaagatcaaacgctgaagtaatcaatttttctgcctcgtttttactacaactagttttcatcaatgtagcgacgatgtattgtttagttactcttggtctaatactgatgatagagatattattgcttcccataatggatcttctagtagtcaccttaaagcccattgatgcgaatagcagatagataaagtcttggtatgactcctttctaatatagtacggactacctttgtcacccaactttatacccacataagccataacaacctctttaatagccgtttcatgaggtttatcagccatgagcctgagtagttggaagaatctcatgaatcccgtctcagaaagtcctatatgcatgatagatttatctttcctgggaaactctcgtatagtcatagatgaaatactcttcaaagtttctgaaataagattagtaacagtcttacctccgactactctgggtaacaaacatactctaataggtgttttctctgcggagataatatcagaaaggatagagcaataagtagtattattgtgattataaagaccgaatacataacaggtagaatttataaacatcatgtcctgaaggtttttagacttgtattcctcgtaatccataccgtcccaaaacatggatttggtaactttgatagccgtagatctttgttccttcgccaacaggttaaagaaattaataaagaatttgttgtttctatttatgtccacaaattgcacgtttggaagcgccacggttacattcactgcagcattttgaggatcgcgagtatgaagtacgatgttattgtttactggtatatctggaaagaaatctaccagtctaggaataagagattgatatcgcatagaaatagtaaagtttataatctcatcatcgaagagcattttgttaccattgtaataaatatccactctgtcatatgtataaatgaagtactgttcaaacatgatgagatgtttatatgttggcatagtagtgagatcgacgtttggtaatggcaatgtattaagattaactccataatgtctagcagcatctgcgatgttataagcgtcgtcaaagcggggtcgatcttgtattgttatatattgtctaacacctataagattatcaaaatcttgtctgcttaatacaccgttaacaatttttgccttgaattcttttattggtgcattaataacatccttatagaggatgttaaacaaataagtgttatcaaagttaagatctggatatttcttttctgctagaacatccattgagtcggagccatctggtttaatataaccaccgataaatctagctctgtattctgtatccgtcaatctaatattaagaaggtgttgagtgaaaggtggaagatcgtaaaagctgtgagtattaatgataggattagtttccgaactaatgttaattggggtattaataatatctatatttccagcgttaagtgtaacattaaacagttttaattcacgtgacgtggtatcaattaaataattaatgcccaatttggatatagcagcctgaagctcatcttgtttagttacggatcctaatgagttattaagcaatatatcgaacggatgaacgaaggttgttttaagttggtcacatactttgtaatctagacatagatgcggaagaacggtagaaactatacgaaataaatattcagagtcctctaattgatcaagagtaactattgacttaataggcatcatttatttagtattaaatgacgaccgtaccagtgacggatatacaaaacgatttaattacagagttttcagaagataattatccatctaacaaaaattatgaaataactcttcgtcaaatgtctattctaactcacgttaacaacgtggtagatagagaacataatgccgccgtagtgtcatctccagaggaaatatcctcacaacttaatgaagatctatttccagatgatgattcaccggccactattatcgaacgagtacaacctcatactactattattgacgatactccacctcctacttttcgtagagagttattgatatcggaacaacgtcaacaacgagaaaaaagatttaatattacagtatcgaaaaatgctgaagcaataatggaatctagatctatgataacttctatgccaacacaaacaccatccttgggagtagtttatgataaagataaaagaattcagatgttggaggatgaagtggttaatcttagaaatcaacgatctaatacaaaatcatctgataatttagataattttaccaaaatactatttggtaagactccgtataaatcaacagaagttaataagcgtatagccatcgttaattatgcaaatttgaacgggtctcccttatcagtcgaggacttggatgtttgttcagaggatgaaatagatagaatctataaaacgattaaacaatatcacgaaagtagaaaacaaaaaattatcgtcactaacgtgattattattgtcataaacattatcgagcaagcattgctaaaactcggatttgaagaaatcaaaggactgagtaccgatatcacttcagaaattatcgatgtggagatcggagatgactgcgatgctgtagcatcaaaactaggaatcggtaacagtccggttcttaatattgtattgtttatactcaagatattcgttaaacgaattaaaattatttaatttaatacattcccatatccagacaacaatcgtctggattaatctgttcctgtcgtctcataccggacgacatattaatctttttattagtaggcatctttttagatggtttctttttcccagcattaactgagtcgatacctagaagatcgtgattgatctctccgaccattccacgaacttctaattggccgtctctaacggtaccataaactattttaccagcattagtaacagcttggacaatctgaccatccatcgcattgtacgatgtagtagtaactgttgttctacgtctaggagcaccagaagtatttttggagcccttggaggctgatgtagaagaagacgaggattttgattttggtttacatgtaatacattttgaactctttgattttgtatcacatgcgccggcagtcacatctgtttgagaattaagattattgttgcctcctttgacggctgcatctccaccgatttgcgctagtagatttttaagctgtggtgtaatcttattaactgtttcgatataatcatcgtaactgcttctaacggctaaattttttttatccgccatttagaagctaaaaatatttttatttatacagaagatttaactagattatacaatgaactaatatgatccttttccagattatttacaaacttggtattttttggttctggaggaggcgaatttaaattcggacttggattcggattttgtgagttcttgatcttattatacatcgagtataggatggcgacggtaactgctacacaaataccgatcaacaaaagaataccaatcatttattgacaataacttcactattgatcaagtatgcaatatatcatcttttcactaaataagtagtaataatgattcaacaatgtcgagatatatggacgataataatttagttcatggaaatatcgctatgattggtatgaatgactccgctaactctgtggggcgcgcagtgctttccccacatagaataaattagcattccgactgtgataataataccaagtataaacgccataatactcaatactttccatgtacgagtgggactggtagacttactaaagtcaataaaggcgaagatacacgaaagaatcaaaagaatgattccagcgattagcacgccggaaaaataatttccaatcataagcatcatgtccatttaactaataaaaattttaaatcgccgaatgaacaaagtggaatataaaccatataaaaacaatagtttgtactgcaaaaataatatctatttttgttttcgaagatatggtaaaattaaatagtagtacacagcatgttataactaacagcagcaacggctcgtaattacttatcatttactagacgaaaaggtggtgggatattttcttgctcaaataatacgaatatatcacccatccattttatgcgatgtttatatactctaatctttaatagatctatagacgacgggtttaccaacaatatagattttatcgattcatctaatttaaacccttccttaaacgtgaatgatctattatctggcataacgatgaccctacctgatgaatcggacaatgtactgggccatgtagaataaattatcaacgaattatcgtctacgaacatttatatcatttgttttaattttaggacgcgaataaatagatataaaatagaaaataacagatattacaaccagtgttatggccgcgcccaaccaggtaggcagttttattttatcttttactacaggttctcctggatgtacgtcaccaacggcggacgtagttctagtacaattagacgtaagttccgcttgggaattttttaacgctaaagagttaacgttaatcgtgcacccaacgtatttacatctagttctttgaacatcttgattataatataaccattttctatctctagattcgtcggtgcactcatgtaaccaacataccctaggtcctaaatatttatctccggaattagattttggataattcgcgcaccaacaatttctatttcctttatgatcgttacaaaagacgtataatgccgtatccccaaaagtaaaataatcaggacgaataattctaataaactcagaacaatatctcgcatccatatgtttggagcaaatatcggaataagtagacatagccggtttccgttttgcacgtaaccattctaaacaattggggtttccaggatcgtttctacaaaatccagtcatgaaatcgtcacaatgttctgtcttgtaattattattaaatatttttggacagtgtttggtatttgtcttagaacaacattttgccacgctatcactatcgcccaggagataatccttttttataaaatgacatcgttgcccggatgctatataatcagtagcgtgttttaaatccttaatatattcaggagttacctcgttctgataatagattaatgatccaggacgaaatttgaaagaactacatggttctccatgaattaatacatattgtttagcaaattcaggaactataaaactactacaatgatctatcgacataccatctatcaaacaaaacttgggtttaatttctcccggagatgtttcataatagtacgtataactttcttctgcaaacttaacagctctattatattcaggataattaaaacctaattccatatatttgtctcgtatatctgctattcctggtgctattttgattctattaagagtaacagctgcccccattcttaataatcgtcagtatttaaactgttaaatgttggtatatcaacatctaccttatttcccgcagtataaggtttgttgcaggtatactgttcaggaatggttacatttatacttcttctatagtcctgtctttcgatgttcatcacatatgcaaagaacagaataaacaaaataatgtaagaaataatattaaatatctgtgaattcgtaaatacattgattgccataataattacagcagctacaatacacacaatagacattcccacagtgttgccattacctccacgatacatttgagttactaagcaataggtaataactaagctagtaagaggcaatagaaaagatgagataaatatcatcaatatagagattagaggagggctatatagagccaagacgaacaaaatcaaaccgagtaacgttctaacatcattatttttgaagattcccaaataatcattcattcctccataatcgttttgcatcatacctccatctttaggcataaacgattgctgctgttcctctgtaaataaatctttatcaagcactccagcacccgcagagaagtcgtcaagcatattgtaatatcttaaataactcatttatatattaaaaaatgtcactattaaagatggagtataatctttatgccgaactaaaaaaaatgacttgtggtcaacccctaagtctttttaacgaagacggggatttcgtagaagttgaaccgggatcatcctttaagtttctgatacctaagggattttacgcctctccttccgtaaagacgagtctagtatttgaaacattaacaacgaccgataataaaatcactagtatcaatccaacaaatgcgccaaagttatatcctcttcaacgcaaagtcgtatctgaagtagtttctaatatgaggaaaatgatcgaatcaaaacgtcctctatacattactcttcacttggcgtgtggatttggtaagactattaccacgtgttatcttatggctacacacggtagaaaaaccgtcatttgcgtacccaataaaatgttaatacatcaatggaagacacaggtagaggcagtcggattggaacataagatatccatagatggagtaagtagtctattaaaggaactaaagactcaaagtccggatgtattaatagtagtcagtagacatctgacaaacgatgccttttgtaaatatatcaataagcattatgatttgttcatcttggatgaatcacatacgtataatctgatgaacaatacagcagttacaagatttttagcgtattatcctccgatgatgtgttattttttaactgctacacctagaccagctaaccgaatttattgtaacagtattattaatattgccaagttatccgatctaaaaaaaactatctatgcggtagatagtttttttgagccatattccacagacaatattagacatatggtaaaacgactagatggaccatctaataaatatcatatatataccgagaagttattatctgtagacgagcctagaaatcaacttattcttaataccctggtagaagaattcaagtcaggaactattaatcgcattttagttattactaaactacgtgaacatatggtattattctacaaacgattattagatcttttcggaccagaggttgtatttataggagacgcccaaaatagacgtactccagatatggtcaaatcaatcaaggaactaaatagatttatattcgtatccaccttattttattccggtactggtttagatattcctagtttggattcgttgttcatttgctcggcagtaatcaacaatatgcaaatagagcaattactagggagggtatgtcgagaaacagaactattagataggacggtatatgtatttcctaacacatccatcaaagaaataaagtacatgataggaaatttcatgcaacgaattattagtctgtctgtagataaactaggatttaaacaagaaagttatcggaaacatcaagaatccgatcccacttctgtatgtacaacatcctccagagaagaacgtgtattaaatagaatatttaactcgcaaaatcgttaagaagtttaagcgacgatccgcatgctgcgcaggccagtgtattacccctcatagtattaatataatccaatgatacttttgtgatgtcggaaatcttaaccaatttagactgacaggcagaacacgtcatgcaatcatcatcgtcatcgataactgtagtcttgggcttctttttgcggctcttcattccggaacgcacattggtgctatccatttaggtagtaaaaaataagtcagaatatgccctataacacgatcgtgcaaaacctggtatatcgtctctatctttatcacaatatagtgtatcgacatctttattattattgacctcgtttatcttggaacatggaatgggaacatttttgttatcaacggccacctttgccttaattccagatgttgtaaaattataactaaacagtctatcatcgacacaaatgaaattcttgtttagacgtttgtagtttacgtatgcggctcgttcgcgtctcattttttcagatattgcaggtactataatattaaaaataagaatgaaataacataggattaaaaataaagttatcatgacttctagcgctgatttaactaacttaaaagaattacttagtctgtacaaaagtttgaaattttcagattctgcggctatagaaaagtataattctttggtagaatggggaacatctacttactggaaaataggcgtgcaaaaggtagctaatgtcgagacgtcaatatctgattattatgatgaggtaaaaaataaaccgtttaatattgatccgggctattacattttcttaccggtatattttgggagcgtctttatttattcgaagggtaaaaatatggtagaacttggatctggaaactcttttcaaataccagatgatatgcgaagtgcgtgtaacaaagtattagacagcgataacggaatagactttctgagatttgttttgttaaacaatagatggataatggaagatgctatatcaaaatatcagtctccagttaatatatttaaactagctagtgagtacggattaaacatacccaaatatttagaaattgaaatagaggaagacacattatttgacgacgagttatactctattatagaacgctcttttgatgataaatttccaaaaatatccatatcgtatattaagttgggagaacttaggcggcaagttgtagactttttcaaattctcgttcatgtatattgagtccatcaaggtagatcgtataggagataatatttttattcctagcgttataacaaaatcaggaaaaaagatattagtaaaagatgtagaccatttaatacgatctaaggttagagaacatacatttgtaaaagtaaaaaagaaaaacacattttccattttatacgactatgatgggaacggaacagaaactagaggagaagtaataaaacgaattatagacactataggacgagactattatgttaacggaaagtatttctctaaggttggtagtgcaggcttaaagcaattgactaataaattagatattaatgagtgcgcaactgtcgatgagttagttgatgagattaataaatccggaactgtaaaacgaaaaataaaaaaccaatcagcatttgatttaagcagagaatgtttgggatatccagaagcagattttataacgttagttaataacatgcggttcaaaatagaaaattgtaaggttgtaaatttcaatattgaaaatactaattgtttaaataacccgagtattgaaactatatatggaaactttaaccagttcgtctcaatctttaatatcgtcaccgatgtcaaaaaaagattattcgagtgaaataatatgcgcctttgatataggtgcaaaaaatcctgccagaactgttttagaagtcaaggataactccgttagggtattggatatatcaaaattagactggagttctgattgggaaaggcgcatagctaaagatttgtcacaatatgaatacactacagttcttctagaacgtcagcctagaaggtcgccgtatgttaaatttatctattttattaaaggctttttatatcatacatcggctgccaaagttatttgcgtctcgcctgtcatgtctggtaattcatatagagatcgaaaaaagagatcggtcgaagcatttcttgattggatggacacattcggattgcgagactccgttccggatagacgcaaattagacgatgtagcggatagtttcaatttggctatgagatacgtattagataaatggaatactaattatacaccttataataggtgtaaatctagaaattacataaaaaaaatgtaataacgttagtaacgccattatggataatctatttacctttctacatgaaatagaagatagatatgccagaactatttttaactttcatctaataagttgcgatgaaataggagatatatatggtcttatgaaagaacgcatttcctcagaggatatgtttgataatatagtatataataaagatatacatcctgccattaagaaactagtgtattgcgacatccaacttactaaacacattattaatcagaatacgtatccggtatttaacgattcttcacaagtgaaatgttgtcattatttcgacataaactcagataatagcaatattagctctcgtacagtagagatatttgagagggaaaagtcatctcttgtatcatatattaaaactaccaataagaagagaaaggtcaattacggcgaaataaagaaaactgttcatggaggcactaatgcaaattacttttccggtaaaaagtctgacgagtatctgagtactacagttagatccaacattaatcaaccttggatcaaaaccatttctaagagaatgagagtagatatcattaatcactctatagtaacgcgtggaaaaagctctatattacaaactatagaaattatttttactaatagaacatgtgtgaaaatattcaaggattctactatgcacattattctatccaaggacaaggatgaaaaggggtgtatacacatgattgacaaattattctatgtctattataatttatttctgttgttcgaagatatcatccaaaacgagtactttaaagaagtagctaatgttgtaaaccacgtacttacggctacggcattagatgagaaattattcctaattaagaaaatggctgaacacgatgtttatggagttagcaatttcaaaatagggatgtttaacctgacatttattaagtcgttggatcataccgttttcccctctctgttagatgaggatagcaaaataaagttttttaaggggaaaaagctcaatattgtagcattacgatctctggaggattgtataaattacgtgactaaatccgagaatatgatagaaatgatgaaggaaagatcgactattttaaatagcatagatatagaaacggaatcggtagatcgtctaaaagaattgcttctaaaatgaaaaaaaacactgattcagaaatggatcaacgactagggtataagtttttggtgcctgatcctaaagccggagttttttatagaccgttacatttccaatatgtatcgtattctaattttatattgcatcgattgcatgaaatcttgaccgtcaagcggccactcttatcgtttaagaataatacagaacgaattatgatagaaattagcaatgttaaagtgactcctccagattactcacctataatcgcgagtattaaaggtaagagttatgatgcattagccacgttcactgtaaatatctttaaagaggtaatgaccaaagagggtatatccatcactaaaataagtagttatgagggaaaagattctcatttgataaaaattccgctactaataggatacgggaataaaaatccacttgatacagccaagtatcttgttcctaatgtcataggtggagtctttatcaataaacaatctgtcgaaaaagtaggaattaatctagtagaaaagattacaacatggccaaaatttagggttgttaagccaaactcattcactttctcgttttcctccgtatcccctcctaatgtattaccgacaagatatcgccattacaagatatctctggatatatcacaattggaagcgttgaatatatcatcgacaaagacatttataacggtcaatattgttttgctgtctcaatatttatctagagtgagtctagaattcattagacgtagtttatcatacgatatgcctccagaagttgtctatctagtaaacgcgataatagatagtgctaaacgaattactgaatctattactgactttaatattgatacatacattaatgacctggtggaagctgaacacattaaacaaaaatctcagttaacgatcaacgagttcaaatatgaaatgctgcataactttttacctcatatgaactatacacccgatcaactaaagggattttatatgatatctttactaagaaagtttctctactgtatctaccacacttctagatatccagatagagattcgatggtttgtcatcgcatcctaacgtacggcaaatattttgagacgttggcacatgatgaattagagaattacataggcaacatccgaaacgatatcatgaacaatcacaagaacagaggcacttacgcggtaaacattcatgtactaacaactcccggacttaatcacgcgttttctagcttattgagtggaaagttcaaaaagtcagacggtagttatcgaacacatcctcactattcatggatgcagaatatttctattcctaggagtgttggattttatccggatcaagtaaagatttcaaagatgttttctgtcagaaaataccatccaagtcaatatctttacttttgttcatcggacgttccggaaagaggtcctcaggtaggtttagtatctcaattgtctgtcttgagttccattacaaatatactaacgtctgagtatttggatttggaaaagaaaatttgtgagtatatcagatcatattataaagatgatataagttactttgaaacaggatttccaatcactatagaaaatgctctagtcgcatctcttaatccaaatatgatatgtgattttgtaactgactttagacgtagaaaacggatgggattcttcggtaacttggaggtaggtattactttagttagggatcacatgaatgaaattcgcattaatattggagcgggaagattagtcagaccattcttggttgtggataacggagagctcatgatggatgtgtgtccggagttagaaagcagattagacgacatgacattctctgacattcagaaagagtttccgcatgtcatcgaaatggtagatatagaacaatttacttttagtaacgtatgtgaatcggttcaaaaatttagaatgatgtcaaaggatgaaagaaagcaatacgatttatgtgactttcctgccgaatttagagatggatatgtggcatcttcattagtgggaatcaatcacaattctggacccagagctattcttggatgtgctcaagctaaacaagctatctcttgtctgagttcggatatacgaaataaaatagacaatggaattcatttgatgtatccagagaggccaatcgtgattagtaaggctttagaaacttcaaagattgcggctaattgcttcggccaacatgttactatagcattaatgtcgtacaaaggtatcaatcaagaggatggaattatcatcaaaaaacaatttattcagagaggcggtctcgatatagttaccgcaaagaaacatcaagtagaaattccgttggaaaactttaataacaaagaaagagataggtctaacgcctattcaaaattagaaagtaatggattagttagactgaatgctttcttggaatccggagacgctatggcacgaaatatctcatcaagaactcttgaagatgattttgctagagataatcagattagcttcgatgtttccgagaaatataccgatatgtacaaatctcgcgttgaacgagtacaagtagaacttactgacaaagttaaggtacgagtattaaccatgaaagaaagaagacccattctaggagataaatttaccactagaacgagtcaaaagggaacagtcgcgtatgtcgcggatgaaacggaacttccatacgacgaaaatggtatcacaccagatgtcattattaattctacatccatcttctctagaaaaactatatctatgttgatagaggttattttaacagccgcatattctgctaagccgtacaacaataagggagaaaaccgacctgtctgttttcctagtagtaacgaaacatccatcgatacatatatgcaattcgctaaacaatgttatgagcattcaaatccgaaattgtccgatgaagaattatcggataaaatcttttgtgaaaagattctctatgatcctgaaacggataagccttatgcatccaaagtattttttggaccaatttattacttgcgtctgaggcatttaactcaggacaaggcaaccgttagatgtagaggtaaaaagacgaagctcattagacaggcgaatgagggacgaaaacgtggaggaggtatcaagttcggagaaatggagagagactgtttaatagcgcatggcgcagccaatactattacagaagttttaaaagactcagaagaggattatcaagatgtgtatgtttgtgaaaattgtggagacatagcagcacaaatcaagggtattaatacatgtcttagatgttcaaaacttaatctctctcctctcttaacaaaaattgataccacgcacgtatctaaagtatttcttactcaaatgaacgccagaggcgtaaaagtcaaattagatttcgaacgaaggcctccttcgttttataaaccattagataaagttgatctcaagccgtcttttctggtgtaatattctagtttggtagtagatacatatcaatatcatcaaattcgagatccgaattataaaatgggcgtggattgttaactatagaatcggacgtctgatattcgaaaatctgtggagttttaggttttggtggaggtgtaactgctacttgggatactgaagtctgatattcagaaagctgggggatgttctggttcgacatccaccgatggtgtcacatcactaatcggttcggtaacgtctgtggatggaggtgctacttctacagaacctgtagcctcagttgtcaacggagatacatttttaatgcgaggaaatgtataatttggtaatggtttctcatgtggatctgaagaagaggtaagatatctactagaaagataccgatcacgttctagttctcttttgtagaacttaactttttctttctcagcatctagttgatattccaacctcttcacgttactacgttcagattccaattcacgttcgcatgggttacctccgcagtttttacgagcgatttcacgttcagccttcatgcgtctctccttctctctatcgagtttatcagagcagtctttctgaaggcgatcgaactccataaatttctccaacgctttgattgtttccatagatttccgaagttcagcttttaggactgtgattctttttctttcgaattcacagctggatgtgcaaccgtttccattaccgccatctctaagtttcttttctagatcggcaacatttcatccccatgccttttacattcctcgagtctactgtcgtcgaaatatcgttccagctccttttcgacatcaataactttagcacgttgtctctcaagctctcttttgtagttatctgattccctggcacgtttaagatcttcatgcaattgagtcagctcttaacacaatctcttgcttcttcgtcatagtacttacaatcactatgggatccattgttaccacgtctacactcggcgagctcgcgtttaagagattcaatttcccgtttgtattggtccatgtttccattgctaccaccattagatttacaggctgctagttgtcgttcgagatcagaaatacgggttttcttggaattgatttcgtcgatgtacttggcatcgaaacacttattaagttctttttccaattctacgattttatttctttcgcgagtcaattccctcctgtagtaactatctgttttgtcagattcacgctctctacgtagactttcttgcaagttactaatttgttccctagcacgtccgagtttagttttatatgctgaatagagttctgattcatcctttgagcagatctctagcgatcgtttaagattcctgattctagtctttagcctatttacctcctcagaagatgttccgttaccgttgcgtttacactcgttaagctgtctatcaagatccatgattctatctctaagacgttgcatctctctttccatatcagcattgctttcattattacgtctgcagtcactcaactgtctttcaatatctgagattctatctctaagacgtcgcatctctctctgtttcggcattggtttcattattacgtctacagtcgttcaactgtctttcaagatctgatattctagattggagtctgctaatctctgtagcattttcacggcattcactcagttgtctttcaagatctgagattttagattggagtctgctaatctctgtaagatttcctcctccgctctcgatgcagtcggtcaacttattctctagttctctaatacgcgaacgcagtgcatcaacttcttgcgtgtcttcctggttgcgtgtacattcatcgagtctagattcgagatctctaacgcgtcgtcgttcttcctcaagttctctgcgtactacagaaagcgtgtccctatcttgttgatatttagcaatttctgattctagagtactgattttgcttacgtagttactaatagttgtcttggccttatcaagatcctccttgtatttgtcgcattccttgatatccctacgaagtctggacagttcccattcgacattacgacgtttatcgatttcagctcggagatcgtcatcgcgttgttttagccacatacgactgagttcaagttctcgttgacaagatccatctacttttccattcctaatagtatccagttccttttctagttctgaacgcatttctcgttccctatcaagcgattctctcaattctcggatagtcttcttatcaatttctaataaatctgaaccatcatctgtcccattttgaatatccctgtgttctttgatctcttttgtaagtcggtcgattctttcggttttataaacagaatccctttccaaagtcctaatcttactgagtttatcactaagttctgcattcaattcggtgagttttctcttggcttcttccaactctgttttaaactctccactatttccgcattcttcctcgcatttatctaaccattcaattagtttattaataactagttggtaatcagcgattcctatagccgttcttgtaattgtgggaacataattaggatcttctaatggattgtatggcttgatagcatcatctttatcattattagggggatggacaaccttaattggttggtcctcatctcctccagtagcgtgtggttcttcaataccagtgttagtaataggcttaggcaaatgcttgtcgtacgcgggcacttcctcatccatcaagtatttataatcgggttctacgtctgaatattcttttctaagagacgcgacttcgggagttagtagaagaactctgtttctgtatctatcaacgctggaatcaatactcaagttaaggatagcgaatacctcatcgtcatcatccgtatcttctgaaacaccatcatatgacatttcatgaagtctaacgtattgataaatagaatcagatttagtattaaacagatccttaacctttttagtaaacgcatatgtatattttagatctccagatttcataatatgatcacatgccttaaatgtcagtgcttccatgatataatctggaacactaatgggtgacgaaaaagatacagcaccatatgctacgttgataaataaatctgaaccactaagtagataatgattaatgttaaggaagaggaaatattcagtatatagatatgccttagcatcatatcttgtactaaacacgctaaacagtttattgatgtgatcaatttccaacagaataattagagcagcgggaataccaacaaacatattaccacatccgtattttctatgaatatcacatatcatgttaaaaaatcttgatagaagagcgaatatctcgtctgacttaatgagtcgtagttcagcagcaacataagtcataactgtaaatagaacatactttcctgtagtgttgattctagactccacatcaacaccattattaaaaatagttttatatacatctttaatctgctctccgttaatcgtcgaacgttctagtatacggaaacactttgatttcttatctgtagttaatgacttagtgatatcacgaagaatattacgaattacatttcttgtttttcttgagagacctgattcagaactcaactcatcgttccatagtttttttacctcagtggcgaaatctttggagtgcttggtacatttttcaataaggttcgtgacctccatttattataaaaaattttattcaaaacttaactacaatcgggtaattataaaatcgtagatctcccatgtggtggaatactaccatctatcgcatgtggatggacagtaggtaatggccatgggaacagtaatgtttgcatatttatctttcttgccagtattactgcatattgtcccaatgtttcgatgtgatgttctaacctatcaactgccgctgtatcacaacaatagtgtccgatgaaattaagattatgatccaatgtgtttaatatatgattatcaagtcttatacgatccgcgtcttttttgacaggatcaggttcttctacaggaagaagtttcggcctcttatgatattcatgtctgggaaacggtggtctagggtgaggctccggtatcggagtgggttttggattataatcatcatcgtctatgacatcatcttcgacttcgatatttattttgctatcttgatgatgtcctgtatcagttgcattttcagcactcgactgaatattagcgcattcattgtctattattaccatatttctaaacccaaaatgtatgtgttgaacatcagtactatcgttgatgagtcttatagcatgaattcgcttatcgttatcgggtttatcttctgtcaccttagcaattccttttttattaaactctacataatcatatccatttctattgtttgttctaatataaacgagtatagcatcattgctaaatttttcaatagtatcgaaaacagaatatcctaaaccatataatatatattcagggacactcaaactaaatgtccaggattctcctaaatacgtaaactttaatagtgcgaaatcattcaaaaatctaccacttatagatagatagtacataaatgcgtatagtagtctacctatctctttattatgaaaaccggcattacgatcatatatgtcgtgatatacctgtgatccgtttacgttaaaccataaatacatgggtgatcctataaacatgaatttatttctaattctcagagctatagttaattgaccgtgtaatatttgcttacatgcatacttgatacgctcattaataaaatttttatcattgctcgttatctcagaatcgtatatataaggagtaccatcgtgattcttaccagatattatacaaaatactatatataaaatatattgaccaacgttagtaatcatataaatgtttaacgttttaaattttgtattcaatgatccattatcatacgctagcatggtcttatgatattcattctttaaaatataatattgtgttagccattgcattggggctcctaatggagattttttattctcatccattttaggataggctttcataaagtccctaataacttcgtgaataatgtttctatgttttctactgatgcatgtatttgcttcgatttttttatcccatgtttcatctatcatagatttaaacgcagtaatgctcgcaacattaacatcttgaaccgttggtacaattccgttccataaatttataatgttcgccatttatataactcattttttgaatatacttttaattaacaaaagagttaagttactcatatgggcgccgtccagtctgaacatcaatctttttagccagagatatcatagccgctcttagagtttcagcgtgattttccaacctaaatagaacttcatcgttgcgtttacaacacttttctatttgttcaaactttgttgttacattagtaatctttttttccaaattagttagccgttgtttgagagtttcctcattgtcgtcttcatcggctttaacaattgcttcgcgtttagcctctggctttttagcagcctttgtagaaaaaaattcagttgctggaattgcaagatcgtcatctccggggaaaagagttccgtccatttaaagtacagattttagaaactgacactctgcgttatttatatttggtacaacacatggattataaatatcgatgttaataacatcagaaaatgtaaagtctatacattgttgcatcgtgttaaattttctaatggatctagtattattgggtccaacttctgcctgaaatccaaatatggaagcggatacaaaaccgtttcctggataaaccacacatctccacttttgctttacatcagaaattgtgtcgttgacatcttgaactctcctatctaatgccggtgttccacctatagattttgaatattcgaatgctgcatgagtagcattaaattccttaatattgccataattttcatatattgagtaaccctggataaaaagtaaacacaccgcagccgtcgctaccacaataaaaaaaattgatagagagttcatttataatctattagaagctgacaaaatttttttacacgcatcagacaatgctttaataaatagttcaacatctacttttgtcatatcgaaccgatggtatgattctaacctagaattacatccgaaaaagttgactatgttcatagtcattaagtcattaacaaacaacattccagactctggattataagacgatactgtttcgtcacaattacctaccttaatcatgtgattatgaatattggctattagagcaccttctaagaaatctataatatctttgaaacacgatttaaaatcaaaccacgaatatacttctacgaagaaagttagtttacccataggagaaataactataaatggagatctaaatacaaaatccggatctatgatagttttaacattattatattctctattaaatacctccacatctaaaaatgttaattttgaaactatgtcttcgtttattaccgtacctgaactaaacgctataagctctattgtttgagaactctttaaacgatattcttgaaatacatgtaacaaagtttcctttaactcggtcggtttatctaccatagttacagaatttgtatccttatctataatataataatcaaaatcgtataaagttatataattatcgcgttcagattgggatcttttcaaatagactaaaaaccccatttctctagtaagtatcttatgtatatgtttgtaaaatatcttcatggtgggaatatgctctaccgcagttagccattcctcattgacagcggtagatgtattagacaaaactattccaatgtttaacaagggccattttacgagattattaaatccttgtttgataaatgtagccaatgagggttcgagttcaacgacgattgaattctcttcccgcggatgctgcatgatgaacgacgggatgttgttcgattgatttggaattctttttcgactttttgtttatattaaatattttaaaatttatagcggatagcaattcatgtaccacggataatgtagacgcgtattgcgcatcgatatctttattattagataaatttatcaataaatgtgagaagtttgcctcgttaaggtcttccatttaaatattatataaacatttgtgtttgtatcttattcgtcttttatggaatagttttttactagtaaagctgcaattacacactttgtccgtaaaacataaatataaacaccagcttttatcaatcgttccaaaaagtcgacggcggacatttttaacatggcatctattttaaatacacttaggtttttggaaaaaacatcattttataattgtaacgattcaataactaaagaaaagattaagattaaacataagggaatgtcatttgtattttataagccaaagcattctaccgttgttaaatacttgtctggaggaggtatatatcatgatgatttggttgtattggggaaggtaacaattaataatctaaagatgatgctattttacatggatttatcatatcatggagtgacaagtagtggagcaatttacaaattgggatcgtctatcgatagactttctctaaataggactattgttacaaaagttaataattatgatgatacattttttgacgacgatgattgatcgctattgcacaattttgtttttttactttctaatatagcgtttagattctttttcatgtgcgaatattgatttactaaaatatcgatgtttaacttttgttctatgacgtccttatcagcggtatcggtacatatacgtaattcaccttcacaaaatacggagtcttcgataataatagccaatcgattattggatctagctgtctgtatcatattcaacatgtttaatatatcctttcgtttcccctttacaggcatcgatcgtagcatattttccgcgtctgagatggaaatgttaaaactacaaaaatgcgtaatgttagcccgtcctaatattggtacgtgtctataagtttggcatagtagaataatagacgtgtttaaatgccttccaaagtttaagaattctattagagtattgcattttgatagtttatcacctacatcatcaaaaataagtaaaaagtgtgctgattttttatgattttgtgcgacagcaatacatttttctatgttacttttagttcgtatcagattatattctagagattcctgactactaacgaaattaatatgatttggccaaatgtatccatcataatctgggttataaacgggtgtaaacaagaatatatgtttatattttttaactagtgtagaaaacagagatagtaaatagatagtttttccagatccagatcctcccgttaaaaccattctaaacggcatttttaataaattttctcttgaaaattgtttttcttggaaacaattcataattatatttacagttactaaattaatttgataataaatcaaaatatggaaaactaaggtcgttagtagggaggagaacaaagaaggcacatcgtgacataaataacatttattatcatgatgacaccagaaaacgacgaagagcagacatctgtgttctccgctactgtttacggagacaaaattcaaggaaagaataaacgcaaacgcgtgattggtctatgtattagaatatctatggttatttcactactatctatgattaccatgtccgcgtttctcatagtgcgcctaaatcaatgcatgtctgctaacgaggctgctattactgacgccgctgttgccgttgctgctgcatcatctactcatagaaaggttgcgtctagcactacacaatatgatcacaaagaaagctgtaatggtttatattaccagggttcttgttatatattacattcagactaccagttattctcggatgctaaagcaaattgcactgcggaatcatcaacactacccaataaatccgatgtcttgattacctggctcattgattatgttgaggatacatggggatctgatggtaatccaattacaaaaactacatccgattatcaagattctgatgtatcacaagaagttagaaagtatttttgtgttaaaacaatgaactaatatttatttttgtacattaataaatgaaatcgcttaatagacaaactgtaagtaggtttaagaagttgtcggtgccggccgctataatgatgatactctcaaccattattagtggcataggaacatttctgcattacaaagaagaactgatgcctagtgcttgcgccaatggatggatacaatacgataaacattgttatttagatactaacattaaaatgtctacagataatgcggtttatcagtgtcgtaaattacgagccagattgcctagaccggatactagacatctgagagtattgtttagtattttttataaagattattgggtaagtttaaaaaagaccaatgataaatggttagatattaataatgataaagatatagatattagtaaattaacaaattttaaacaactaaacagtacgacggatgctgaagcgtgttatatatacaagtctggaaaactggttaaaacagtatgtaaaagtactcaatctgtactatgtgttaaaaaattctacaagtgacaacaaaaaatgaattaataataagtcgttaacgtacgccgccatggacgccgcgtttgttattactccaatgggtgtgttgactataacagatacattgtatgatgatctcgatatctcaatcatggactttataggaccatacattataggtaacataaaaactgtccaaatagatgtacgggatataaaatattccgacatgcaaaaatgctactttagctataagggtaaaatagttcctcaggattctaatgatttggctagattcaacatttatagcatttgtgccgcatacagatcaaaaaataccatcatcatagcatgcgactatgatatcatgttagatatagaagataaacatcagccattttatctattcccatctattgatgtttttaacgctacaatcatagaagcgtataacctgtatacagctggagattatcatctaatcatcaatccttcagataatctgaaaatgaaattgttgtttaattcttcattctgcatatcagacggcaatggatggatcataattgatgggaaatgcaatagtaattttttatcataaaagttgtaaagtaaataataaaacaataaatattgaactagtagtacgtatattgagcaatcagaaatgatgctggtacctcttatcacggtgaccgtagttgcgggaacaatattagtatgttatatattatatatttgtaggaaaaagatacgtactgtctataatgacaataaaattatcatgacaaaattaaaaaagataaagagttctaattccagcaaatctagtaaatcaactgatagcgaatcagactgggaggatcactgtagtgctatggaacaaaacaatgacgtagataatatttctaggaatgagatattggacgatgatagcttcgctggtagtttaatatgggataacgaatccaatgtcatggcgcctagcacagaacacatttacgatagtgttgctggaagcacgctgctaataaataatgatcgtaatgaacagactatttatcagaacactacagtagtaattaatgagacggagactgttgaagtacttaatgaagataccaaacagaatcctaactattcatccaatcctttcgtaaattataataaaaccagtatttgtagcaagtcaaatccgttcattacagaactcaacaataaatttagtgagaataatccgtttagacgagcacatagcgatgattatcttaataagcaagaacaagatcatgaacacgatgatatagaatcatcggtcgtatcattggtgtgattagtttcctttttataaaattgaagtaatatttagtattattgctgccgtcacgttgtacaaatggagatattccctgtattcggcatttctaaaattagcaattttattgctaataatgactgtagatattatatagatacagaacatcaaaaaattatatctgatgagatcaatagacagatggatgaaacggtacttcttaccaacatcttaagcgtagaagttgtaaatgacaatgagatgtaccatcttattccccatagactatcgactattatactctgtattagttctgtcggaggatgtgttatctctatagataatgacatcaatgacaaaaatattctaacatttcccattgatcatgctgtaatcatatccccactgagtaaatgtgtcgtagttagcaagggtcctacaaccatattggttgttaaagcggatatacccagcaaacgattggtaacatcgtttacaaacgacatactgtatgtaaacaatctgtcactgattaattatttgccgttgtctgtattcattattagacgagtcaccgactatttggatagacacatatgcgatcagatatttgcgaataataagtggtattccattataaccatcgacgataagcaatatcctattccatcaaactgtataggtatgtcctctgccaagtacataaattctagcatcgagcaagatactttaatacatgtttgtaacctcgagcatccattcgacttagtatacaaaaaaatgcagtcgtacaattctgtacctatcaaggaacaaatattgtacggtagaattgataatataaatatgagcattagtatttctgtggattaatagatttctagtatggggatcattaatcatctctaatctctaaatacctcataaaacgaaaaaaaagctattatcaaatactgtacggaatggattcattctcttctctttttatgaaactctgttgtatatctactgataaaactggaagcaaaaaatctgataaaaagaataagaataagatcaaggattatatggaacacgattattataaaataacaatagttcctggttcctcttccacgtctactagctcgtggtattatacacatgcctagtaatagtctctttgcgttgacggaaagcagactagaaataacaggctaaaatgttcagacaccataatagttcccaacccagataataacagagtaccatcaacacattcctttaaactcaatcccaaacccaaaaccgttaaaatgtatccggccaattgatagtagataatgaggtgtacagcgcatgataatttacacagtaaccaaaatgaaaatactttagtaattataagaaatatagatggtaacgtcatcatcaacaatccaataatatgccggagagtaaacattgacggataaaacaaaaatgctccgcataactctatcatggcaataacacaaccaaatacttgtaagattcctaaattagtagaaaatacaacggatatcgatgtataagtgatctcgagaaataataagaataaagtaatgcccgtaaagataaacatcaacattgtttggtaatcattaaaccaattagtatgaagttgaactaatttcacagtagattttattccagtgttatcctcgcatgtatacgtacctggtaagatatctttatattctataatcaatgagacatcactatccgataacgaatgaagtctagcactagtatgccatttacttaatatggtcgtcttggaagttttattataagttaaaatatcatggttgtccaatttccatctaatatactttgtcggattatctatagtacacggaataatgatggtattattacatgctgtatactctatagtctttgtagatgttataatcataaaagtacagaggtatatcaacgatattctaactcttgacattttttatttatttaaaatgatacctttgttatttattttattctattttgctaacggtatcgaatggcataagtttgaaacgagtgaagaaataatttctacttacttattagacgacgtattatacacgggtgttaatggggcggtatacacattttcaaataataaactaaacaaaactggtttagctaatactaattatatcacaacatctataaaagtagaggatgcggataaggatacattagtatgcggaaccaataacggaaatcccaaatgttggaaaatagacggttcagacgacccaaaacatagaggtagaggatacgctccttatcaaaatagcaaagtaacgataatcagtcacaacggatgtgtactatctgacataaacatatcaaaagaaggaattaaacgatggagaagatttgacggaccatgtggttatgatttatacacggcggataacgtaattccaaaagatggtttacgaggagcattcgtcgataaagatggtacttatgacaaagtttacattcttttcactgatactatcggctcaaagagaattgtcaaaattccgtatatagcacaaatgtgcctaaacgacgaaggtggtccatcatcattgtctagtcatagatggtcgacgtttctcaaagtcgaattagaatgtgatatcgacggaagaagttatagacaaattattcattctagaactataaaaacagataatgatacgatactatatgtattcttcgatagtccgcattatgtacctattctatgaataccattaaacaatctttttctacgtcaaaattggaaggatatacaaagcaattgccgtctccagctcctggtatatgtctaccagctggaaaagttgttccacataccacgtttgaagtcatagaaaaatataatgtactagatgatattataaagcctttatctaaccaacctatcttcgaaggaccgtctggtgttaaatggttcgatataaaggagaaggaaaatgaacatcgggaatatagaatatacttcataaaagaaaattctatatattcgttcgatacaaaatctaaacaaactcgtagctcgcaagtcgatgcgcgactattttcagtaatggtaacttcgaaaccgttatttatagcagatatagggataggagtaggaatgccacaaatgaaaaaaatacttaaaatgtaatcttaatcgagtacaccacacgacaatgaacaaacataagacagattatgctggttatgcttgctgcgtaatatgcggtctaattgttggaattatttttacagcgacactattaaaagttgtagaacgtaaattagttcatacaccatcaatagataaaacgataaaagatgcatatattagagaagattgtcctactgactggataagctataataataaatgtatccatttatctactgatcgaaaaacctgggaggaaggacgtaatgcatgcaaagctctaaatccaaattcggatctaattaagatagagactccaaacgagttaagttttttaagaagcattagacgcggatattgggtaggagaatccgaaatattaaaccagacaaccccatataattttatagctaagaatgccacgaagaatggaactaaaaaacggaaatatatttgtagcacaacgaatactcccaaactgcattcgtgttacactatataacaattacactacatttttatcataccactacttcggttagatgttttagaaaaaaataaatatcgccgtaccgttcttgtttttataaaaataacaattaacaattatcaaattttttctttaatattttacgtggttgaccattcttggtggtaaaataatctcttagtgttggaatggaatgctgtttaatgtttccacactcatcgtatattttgacgtatgtagtcacatcgtttacgcaatagtcagactgtagttctatcatgcttcctacattagaaggaggaacagttttaaagtctcttggttttaatctattaccgttagttttcatgaaatcctttgttttatccacttcacattttaaataaatgtccactatacattcttctgttaattttactagatcgtcatgggtcatagaatttataggttccgtagtccatggatccaaactagcaaacttcgcgtatacggtatcgcgattagtgtatacaccaactgtatgaaaattaagaaaacagtttaatagatcaacagaaatatttaatcctccgtttgatacagatgcaccatatttatggattttggattcacacgttgtttgtctgaggggttcgtctagcgttgcttctacataaacttctattcccatatattctttattgtcagaatcgcataccgatttatcatcatacactgtttgaaaactaaatggtatacacatcaaaataacaaatactaacgagtacattctgcaatattgttatcgtaattggaaaaatagtgttcgagtgagttggattatgtgagtattggattgtatattttattttatattttgtaataagaataaaatgctaatgtcaagtttattccaatagatgtcttattaaaaacatatataataaataacaatggctgaatggcataaaattatcgaggatatctcaaaaaataataagttcgaggatgccgccatcgttgattacaagactacaaagaatgttctagctgctattcctaacagaacatttgccaagattaatccgggtgaaattattcctctcatcactaatcgtaatattctaaaacctcttattggtcagaaatattgtattgtatatactaactctctaatggatgagaacacgtatgctatggagttgcttactgggtacgcccctgtatctccgatcgttatagcgagaactcataccgcacttatatttttgatgggtaagccaacaacatccagacgtgacgtgtatagaacgtgtagagatcacgctacccgtgtacgcgcaactggtaattaaaataaaaagtaatattcatatgtagtgtcaattttaaatgatgatgatgaaatggataatatccatattgacgatgtcaataatgccggtattggcatacagctcatcgatttttagatttcattcagaggatgtggaattatgttatgggcatttgtattttgataggatctataatgtagtaaatataaaatataatccgcatattccatatagatataattttattaatcgcacgttaaccgtagatgaactagacgataatgtcttttttacacatggttattttttaaaacacaaatatggttcacttaatcctagtttgattgtctcattatcaggaaacttaaaatataatgatatacaatgctcagtaaatgtatcgtgtctcattaaaaatttggcaacgagtacatctactatattaacatctaaacataagacttattctctacatcggtccacgtgtattactataataggatacgattctattatatggtataaagatataaatgacaagtataatggcatctatgattttactgcaatatgtatgctaatagcgtctacattgatagtgaccatatacgtgtttaaaaaaataaaaatgaactcttaattatgctatgctattagaaatggataaaatcaaaattacggttgattcaaaaattggtaatgttgttaccatatcgtataacttggaaaagataactattgatgtcacacctaaaaagaaaaaagaaaaggatgtattattagcgcaatcagttgctgtcgaagaggcaaaagatgtcaaggtagaagaaaaaaatattatcgatattgaagatgacgatgatatggatgtagaaagcgcataatacgatctataaaaataagtatataaatactttttatttactgtactcttactgtgtagtggtgataccctactcgattatttttttaaaaaaatacttattctgattcttctagccatttccgtgttcgttcgaatgccacatcgacgttaaagataggggagtagttgaaatctagttctgcattgttggtacgcacctcaaatgtagtgttggatatcttcaacgtatagttgttgagtagtgatggttttctaaatagaattctcttcatatcattcttgcacgcgtacatttttagcatccatcttggaattctagatccttgttctattcccaatggtttcatcaatagaagattaaacatatcgtacgaacacgatggagagtaatcgtagcaaaagtaagcatttcctttaatctcagatcccggatactggatatattttgcagccaacacgtgcatccatgcaacatttcctacatatacccggctatgcaccgcgtcatcatcgactgtacgatacataatgttaccgtgttgcttacattgctcgtaaaagactttcgtcaatttgtctccttctccgtaaattccagtgggtcttaggcaacaagtatacaattttgctccattcatgattacggaattattggctttcataaccagttgctcggccatacgtttactttttgcgtatacatgtcctggtgatatatcataaagggtatgctcatggccgatgaatggatcaccgtgtttatttggtcctattgcttccatgctactagtatagatcaaatacttgattcctaggtccacacaagctgccaatatagtctgtgttccataatagtttactttcatgatttcattatcggtgtattttccaaatacatccactagagcagccgtatgaataatcagatttaccccatctagcgcttctctcaccttatcaaagtcgtttatatcacattgtatatagtttataaccttaactttcgaggttattggttgtggatcttctacaatatctatgactctgatttcttgaacatcatctgcactaattaacagttttactatatacctgcctagaaatccggcaccaccagtaaccgcgtacacggccattgctgccactcataatatcagactacttattctattttactaaataatggctgtttgtataatagaccacgataatatcagaggagttatttactttgaaccagtccatggaaaagataaagttttaggatcagttattggattaaaatccggaacgtatagtttgataattcatcgttacggagatattagtcaaggatgtgattccataggcagtccagaaatatttatcggtaacatctttgtaaacagatatggtgtagcatatgtttatttagatacagatgtaaatatatctacaattattggaaaggcgttatctatttcaaaaaatgatcagagattagcgtgtggagttattggtatttcttacataaatgaaaagataatacattttcttacaattaacgagaatggcgtttgatatatcagttaatgcgtctaaaacaataaatgcattagtttacttttctactcagcaaaataaattagtcatacgtaatgaagttaatgatacacactacactgtcgaatttgatagggacaaagtagttgacacgtttatttcatataatagacataatgacaccatagagataagaggggtgcttccagaggaaactaatattggttgcgcggttaatacgccggttagtatgacttacttgtataataagtatagttttaaactgattttagcagaatatataagacacagaaatactatatccggcaatatttattcggcattgatgacactagatgatttggctattaaacagtatggagacattgatctattatttaatgagaaacttaaagtagactccgattcgggactatttgactttgtcaactttgtaaaggatatgatatgttgtgattctagaatagtagtagctctatctagtctagtatctaaacattgggaattgacaaataaaaagtataggtgtatggcattagccgaacatatatctgatagtattccaatatctgagctatctagactacgatacaatctatgtaagtatctacgcggacacactgagagcatagaggataaatttgattattttgaagacgatgattcgtctacatgttctgccgtaaccgacagggaaacggatgtataattttttttatagcgtgaaggatatgataaaaaatataattgttgtatttatcccattccaatcaccttatatgattctgtaacacaatgaaggagtctcatagatgtatagaggtcagatactggtttgataaactgtttattccacatgagtatgtttgactttatggttagacccgcatactttaacaaatcactgaaaattggagttaggtattgacctctcagaatcagttgccgttctggaacattaaatgtattttttatgatatactccaacgcatttatgtgggcatacaacaagtcattactaatggagtattccaagagttttagttgtctagtatttaacaagagaagagatttcaacagactgtttatgaactcgaatgccgcctcattgtcgcttatattgatgatgtcgaattctcccaatatcatcaccgatgagtagctcatcttgttatcgggatccaagttttctaaagatgtcattaaaccctcgatcatgaatggatttatcatcatcgtttttatgttggacatgagcttagtccgtttgtccacatctatagacgacgatttctgaattattttatatatccctctctttaactccaggaacttgtcaggatggtctactttaatatgttctcgtctaagagatgaaaatctttggatggttgcacgcgacttttctctaaaggatgacgttgcccaagatcctctcttaaatgaatccatcttatccttggacaagatggacagtctattttccttagatggtttaatatttttgttacccatgatctataaaggtagacctaatcgtctcggatgacctatatatttattttcagttttattatacgcataaattgtaaaaaatatgttaggtttacaaaaatgtctcgtggggcattaatcgtttttgaaggattggacaaatctggaaaaacaacacaatgtatgaacatcatggaatctataccggcaaacacgataaaatatcttaactttcctcagagatccactgtcactggaaagatgatagatgactatctaactcgtaaaaaaacctataatgatcatatagttaatctattattttgtgcaaatagatgggagtttgcatcttttatacaagaacaactagaacagggaattactttaatagttgatagatacgcgttctctggagtagcgtatgccgccgctaaaggcgcgtcaatgactctcagtaagagttatgaatctggattgcctaaacccgacttagttatattcttggaatctggtagcaaagaaattaatagaaacgtcggcgaggaaatttatgaagatgttacattccaacaaaaggtattacaagaatataaaaaaatgattgaagaaggagatattcattggcaaattatttcttctgaattcgaggaagatgtaaagaaggagttgattaagaatatagttatagaggctatacacacggttactggaccagtggggcaactgtggatgtaatagtgaaattacattttttataaatagatgttagtacagtgttataaatggatgaagcatattactctggcaacttggaatcagtactcggatacgtgtccgatatgcataccgaactcgcatcaatatctcaattagttattgccaagatagaaactatagataatgatatattaaacaaggacattgtaaattttatcatgtgtagatcaaacttggataatccatttatctctttcctagatactgtatatactattatagatcaagagaactatcagaccgaattgattaattcattagacgacaatgaaattatcgattgtatagttaataagtttatgagcttttataaggataacctagaaaatatagtagatgctatcattactctaaaatatataatgaataatccagattttaaaactacgtatgccgaagtactcggttccagaatagccgatatagatattaaacaagtgatacgtgagaatatactacaattgtctaatgatatccgcgaacgatatttgtgaaaaatattaaaaaaaaatactttttttattaaatgacgtcgcttcgcgaatttagaaaattatgctgtgatatatatcacgcatcaggatataaagaaaaatctaaattaattagagactttataacagatagggatgataaatatttgatcattaagctattgcttcccggattagacgatagaatttataacatgaacgataaacaaattataaaattatatagtataatatttaaacaatctcaggaagatatgctacaagatttaggatacggatatataggagacactattaggactttcttcaaagagaacacagaaatccgtccacgagataaaagcattttaactttagaagacgtggatagtttcttaactacgttatcatccgtaactaaagaatcgcatcaaataaaattattgactgatatcgcatccgtttgtacatgtaatgatttaaaatgtgtagtcatgcttattgataaagatctaaaaattaaagcgggtcctcggtacgtacttaacgctattagtcctaatgcctatgatgtgtttagaaaatctaataacttgaaagagataatagaaaatgcatctaaacaaaatctagactctatatctatttctgttatgactccaattaatcccatgttagcggaatcgtgtgattctgtcaataaggcgtttaaaaaatttccatcaggaatgtttgcggaagtcaaatacgatggtgaaagagtacaagttcataaaaataataacgagtttgccttctttagtagaaacatgaaaccagtactctctcataaagtggattatctcaaagaatacataccgaaagcatttaaaaaagctacgtctatcgtattggattctgaaattgttcttgtagacgaacataatgtaccgctcccgtttggaagtttaggaatacacaaaaagaaagaatataaaaactctaacatgtgtttgttcgtgtttgactgtttgtactttgatggattcgatatgacggacattccattgtacgaacgaagatcttttctcaaagatgttatggttgaaatacccaatagaatagtattctcagagttgacgaatattagtaacgagtctcagttaactgacgtattggatgatgcactaacgagaaaattagaaggattggtcttaaaagatattaatggagtatacgaaccgggaaagagaagatggttaaaaataaagcgagactatttgaacgagggttccatggcagattctgccgatttagtagtactaggtgcttactatggtaaaggagcaaagggtggtatcatggcagtctttctaatgggttgttacgacgatgaatccggtaaatggaagacggttaccaagtgttcaggacacgatgataatacgttaagggttttgcaagaccaattaacgatggttaaaattaacaaggatcccaaaaaaattccagagtggttggtagttaataaaatctatattcccgattttgtagtagaggatccgaaacaatctcagatatgggaaatttcaggagcagagtttacatcttccaagtcccataccgcaaatggaatatccattagatttcctagatttactaggattagagaagataaaacgtggaaagaatctactcatctaaacgatttagtaaacttgactaaatcttaatagttacatacaaactgaaaattaaaataacactatttagttggtggtcgccatggatggtgttattgtatactgtctaaacgcgttagtaaaacatggcgaggaaataaatcatataaaaaatgatttcatgattaaaccatgttgtgaaagagtttgtgaaaaagtcaagaacgttcacattggcggacaatctaaaaacaatacagtgattgcagatttgccatatatggataatgcggtatccgatgtatgcaattcactgtataaaaagaatgtatcaagaatatccagatttgctaatttgataaagatagatgacgatgacaagactcctactggtgtatataattattttaaacctaaagatgttattcctgttatcatatctataggaaaggataaagatgtctgtgaactattaatctcatcagacatatcgtgtgcatgcgtggagttaaattcatatcacgtagccattcttcccatggatgtttccttttttaccaaaggaaatgcatcattgattattctcctgtttgatttctctatcgatgcagcacctctcttaagaagtgtaaccgataataatgttattatatctagacaccagcgtctacatgacgagcttccgagttccaattggttcaagttttacataagtataaagtccgactattgttctatattatatatggttgttgatggatctgtgatgcatgcgatagctgataatagaactcacgcaattattagcaaaaatatattagacaatactacgattaacgatgagtgtagatgctgttattttgaaccacagattaggattcttgatagagatgagatgctcaatggatcatcgtgtgatatgaacagacattgtattatgatgaatttacctgatgtaggcaaatttggatctagtatgttggggaaatatgaacctgacatgattaagattgctctttcggtggctggtaatttaataagaaatcgagactacattcccgggagacgaggatatagctactacgtttacggtatagcctctagataatttttttaagcacgaaataaaaaacataattttaaaccaatctatttcatactattttgtgtgatcaccatggacataaagatagatattagtatttctggtgataaatttacggtgactactaggagggaaaatgaagaaagaaaaaaatatctacctctccaaaaagaaaaaactactgatgttatcaaacctgattatcttgagtacgatgacttgttagatagagatgagatgtttactattctagaggaatattttatgtacagaggtctattaggcctcagaataaaatatggacgactctttaacgaaattaaaaaattcgacaatgatgcggaagaacaattcggtactatagaagaactcaagcagaaacttagattaaattctgaagagggagcagataactttatagattatataaaggtacaaaaacaggatatcgtcaaacttactgtatacgattgcatatctatgataggattgtgtgcatgcgtggtagatgtttggagaaatgagaaactgttttctagatggaaatattgtttacgagctattaaactgtttattaatgatcacatgcttgataagataaaatctatactgcagaatagactagtatatgtggaaatgtcatagaaagttaaaagttaatgagagcaaaaatatataaggttgtattccatatttgttattttttctgtaatagttagaaaaatacattcgatggtctatctaccagattattatgtgttataaggtactttttctcataataaactagagtatgagtaagatagtgtttttcaaaacatataaatctaaaattgatggatgagatatacagctattaatttcgaaaatatattttaatctgataactttaaacatggatttttgatggtggtttaacgttttaaaaaaagattttgttattgtagtatatgataatattaaaagatggatataaagaatttgctgactgcatgtactattttttacattactacattggctacggcagatatacctactccgccaccaacgggtcatgtgacaagggagaatatcttgataagaggcataatcaatgttgtaatcggtgtccacctggagaatttgccaaggttagatgtaatggtaacgataacacaaaatgtgaacgctgcccacctcatacatataccacaatcccaattattctaatggatgtcatcaatgtagaaaatgcccaaccggatcatttgataaggtaaagtgtaccggaacacagaacagtaaatgttcgtgtcttcctggttggtattgtgctactgattcttcacagactgaagattgttgaaattgtgtaccaaaaaggagatgtccatgcggatactttggtggaatagatgaacaaggaaatcctatttgtaaatcgtgttgtgttggtgaatattgcgactacctacgtaattatagacttgatccatttcctccatgcaaactatctaaatgtaattaattatgattttgatgataatgttaccatacattatatcgctacttggttagtgtattattcagtatgaagacctattaataattacttatcttttgacgatcttgttataattataatataaaaatacttatggcatagtaactcataattgctgacgcgataaattcgtaataatctgttttgttcaaatttttataaggaatctacaggcataaaaataaaaatataatttataatatactcttacagcgcgccatcatgaataacagcagtgaattgattgctgttattaatggatttagaaatagtggacgattttgtgatattagtatagttattaatgatgaaaggataaacgctcataaactcatcctatctggagcctccgaatatttttccattctgttttccaataattttatcgattctaatgaatacgaagttaatctaagtcatttagattatcaaagcgttaacgatttgatcgattacatttatgggatacctttgagcctaactaacgataacgtgaaatatattctttcaaccgctgattttttacaaattggatctgctattacggagtgtgaaaattacatacttaaaaatctttgttctaaaaactgtatcgatttctacatatacgctgataaatataataacaagaaaatagaatcagcgtcgtttaacacaatattacaaaatattttgagactcatcaacgatgaaaactttaaatacttaacagaggaatcaatgataaaaattttaagcgatgatatgttaaatataaaaaatgaggattttgcaccactaattctcattaaatggttagagagtactcaacaatcatgcaccgtcgagttacttagatgcctcagaatatcattgctttccccacaagttataaaatcactttatagtcatcaactggttagttcaatctacgaatgtataacattcttaaacaatatagcattcttggatgaatcatttcctagataccatagcatcgagttgatatctatcggtataagtaattcgcatgataagatttccataaactgctacaatcataaaaaaaatacatgggaaatgatatcttcacgtagatataggtgtagtttcgcagtggccgtcctggataatattatctatatgatgggtggatatgatcagtccccgtatagaagttcaaaggttatagcgtacaatacatgtacaaattcttggatatatgatataccagagctaaaatatcctcgttctaattgtgggggactggctgatgacgaatacatttattgtataggcggcatacgcgatcaggattcatcgttgacatctagtattgataaatggaagccatcaaaaccatattggcagaagtatgctaaaatgcgcgaaccaaaatgtgatatgggggttgcgatgttaaacggattaatatatgtcatgggtggaatcgttaaaggtgacacgtgtaccgacgcactagagagtttatcagaagatggatggatgaagcatcaacgtcttccaataaaaatgtccaatatgtcgacgattgttcatgatggcaagatttatatatctggaggttacaacaatagtagtgtagttaatgtaatatcgaatctagtccttagctataatccgatatatgatgaatggaccaaattatcatcattaaacattcctagaattaatcccgctctatggtcagcgcataataaattatatgtaggaggaggaatatctgatgatgttcgaactaatacatctgaaacatacgataaagaaaaagattgttggacattggataatggtcacgtgttaccacgcaattatataatgtataaatgcgaaccgattaaacataaatatccattggaaaaaacacagtacacgaatgattttctaaagtatttggaaagttttataggtagttgatagaacaaaatacataattttgtaaaaataaatcactttttatactaatatgacacgattaccaatacttttgttactaatatcattagtatacgctacaccttttcctcagacatctaaaaaaataggtgatgatgcaactctatcatgtaatcgaaataatacaaatgactacgttgttatgagtgcttggtataaggagcccaattccattattcttttagctgctaaaagcgacgtcttgtattttgataattataccaaggataaaatatcttacgactctccatacgatgatctagttacaactatcacaattaaatcattgactgctagagatgccggtacttatgtatgtgcattctttatgacatcgcctacaaatgacactgataaagtagattatgaagaatactccacagagttgattgtaaatacagatagtgaatcgactatagacataatactatctggatctacacattcaccggaaactagttctgagaaacctgattatatagataattctaattgctcgtcggtattcgaaatctaagcttaaaaattgaaattttattttttttttttggaatataaataagctcgaagtcgaccaccatggtgggtgaggatagcgtgctgatcaccgagaacatgcacatgaaactgtacatggagggcaccgtgaacgaccaccacttcaagtgcacatccgagggcgaaggcaagccctacgagggcacccagaccatgaagatcaaggtggtcgagggcggccctctccccttcgccttcgacatcctggctaccagcttcatgtacggcagcaaaacctttatcaaccacacccagggcatccccgacttctttaagcagtccttccctgagggcttcacatgggagaggatcaccacatacgaagacgggggcgtgctgaccgctacccaggacaccagcctccagaacggctgcctcatctacaacgtcaagatcaacggggtgaacttcccatccaacggccctgtgatgcagaagaaaacactcggctgggaggccagcaccgagatgctgtaccccgctgacagcggcctgagaggccatagccagatggccctgaagctcgtgggcgggggctacctgcactgctccctcaagaccacatacagatccaagaaacccgctaagaacctcaagatgcccggcttctacttcgtggacaggagactggaaagaatcaaggaggccgacaaagagacctacgtcgagcagcacgagatggctgtggccaggtactgcgacctgcctagcaaactggggcacagctgattaattaatttttatcgatctaattcaacaatgtctggagagctcggtaccaagcttcgcaggatcccgactccggaaccaattactgataaagaagatcatacagttacagacactgtctcatacactacagtaagtacatcatctggaattgtcactactaaatcaaccaccgatgatacgtacaatgataatgatacagtaccaccaactactgtaggcggtagtacaacctctattagcaattataaaaccaaggactttgtagaaatatttggtattaccgcattaattatattgtcggccgtggcaatattctgtattacgtattatatatgtaataaacgttcacgtaaatacaaaacagagaacaaagtctagatttttgacttacataaatgtctgggatagtaaaatctatcatattgagcggaccatctggtttaggaaagacagccatagccaaaagactatgggaatatatttggatttgtggtgtcccataccactagatttcctcgtcctatggaacgagaaggtgttgattaccattacgttaacagagaggccatctggaagggaatagccgccggaaactttctagaacatactgagtttttaggaaatatttacggaacttctaaaacagctgtgaatacagcggctattaataatcgtatttgtgtgatggatctaaacatcgacggtgttagaagtcttaaaaatacgtacctaatgccttactcggtgtatataagacctacctctcttaaaatggttgagaccaagcttcgttgtagaaacactgaagctaacgatgagattcatcgtcgcgtgatattggcaaaaacggatatggatgaggccaacgaagcaggtctattcgacactattatcattgaagatgatgtgaatttagcatatagtaagttaattcagatactacaggaccgtattagaatgtattttaacactaattagagacttaagacttaaaacttgataattaataatataactcgtttttatatgtggctatttcaacgtctaatgtattagttaaatattaaaacttaccacgtaaaacttaaaatttaaaatgatatttcattgacagatagatcacacattatgaactttcaaggacttgtgttaactgacaattgcaaaaatcaatgggtcgttggaccattaataggaaaaggtggattcggtagtatttatactactaatgacaataattatgtagtaaaaatagagcccaaagctaacggatcattatttaccgaacaggcattttatactagagtacttaaaccatccgttatcgaagaatggaaaaaatctcacaatataaagcacgtaggtcttatcacgtgcaaggcatttggtctatacaaatccattaatgtggaatatcgattcttggtaattaatagattaggtgcagatctagatgcggtgatcagagccaataataatagattaccaaaaaggtcggtgatgttgatcggaatcgaaatcttaaataccatacaatttatgcacgagcaaggatattctcacggagatattaaagcgagtaatatagtcttggatcaaatagataagaataaattatatctagtggattacggattggtttctaaattcatgtctaatggagaacatgttccatttataagaaatccaaataaaatggataacggtactctagaatttacacctatagattcgcataaaggatacgttgtatctagacgtggagatctagaaacacttggatattgtatgattagatggttgggaggtatcttgccatggactaagatatctgaaacaaagaattgtgcattagtaagtgccacaaaacagaaatatgttaacaatactgcgactttgttaatgaccagtttgcaatatgcacctagagaattgctgcaatatattaccatggtaaactctttgacatattttgaggaacccaattatgacgagtttcggcacatattaatgcagggtgtatattattaagtgtggtgtttggtcgatgtaaaatttttgtcgataaaaattaaaaaataacttaatttattattgatctcgtgtgtacaaccgaaatcatggcgatgttttacgcacacgctctcggtgggtacgacgagaatcttcatgcctttcctggaatatcatcgactgttgccaatgatgtcaggaaatattctgttgtgtcagtttataataacaagtatgacattgtaaaagacaaatatatgtggtgttacagtcaggtgaacaagagatatattggagcactgctgcctatgtttgagtgcaatgaatatctacaaattggagatccgatccatgatcaagaaggaaatcaaatctctatcatcacatatcgccacaaaaactactatgctctaagcggaatcgggtacgagagtctagacttgtgtttggaaggagtagggattcatcatcacgtacttgaaacaggaaacgctgtatatggaaaagttcaacatgattattctactatcaaagagaaggccaaagaaatgaatgcacttagtccaggacctatcattgattaccacgtctggataggagattgtatctgtcaagttactgctgtggacgtacatggaaaggaaattatgagaatgagattcaaaaagggtgcggtgcttccgatcccaaatctggtaaaagttaaacttggggagaatgatacagaaaatctttcttctactatatcggcggcaccatcgaggtaaccacctctctggaagacagcgtgaataatgtactcatgaaacgtttggaaactatacgccatatgtggtctgtcgtatatgatcattttgatattgtgaatggtaaagaatgctgttatgtgcatacgcatttgtctaatcaaaatcttataccgagtactgtaaaaacaaatttgtacatgaagactatgggatcatgcattcaaatggattccatggaagctctagagtatcttagcgaactgaaggaatcaggtggatggagtcccagaccagaaatgcaggaatttgaatatccagatggagtggaagacactgaatcaattgagagattggtagaggagttcttcaatagatcagaacttcaggctggtgaatcagtcaaatttggtaattctattaatgttaaacatacatctgtttcagctaagcaactaagaacacgtatacggcagcagcttcctttatactctcatcttttaccaacacaaagggtggatatttgttcattggagttgataataatacacacaaagtaattggattcacggtgggtcatgactacctcagactggtagagaatgatatagaaaagcatatcaaaagacttcgtgttgtgcatttctgtgagaagaaagaggacatcaagtacacgtgtcgattcatcaaggtatataaacctggggatgaggctacctcgacatacgtgtgcgctatcaaagtggaaagatgctgttgtgctgtgtttgcagattggccagaatcatggtatatggatactaatggtatcaagaagtattctccagatgaatgggtgtcacatataaaattttaattaatgtaatagagaacaaataataaggttgtaatatcatatagacaataactaacaattaattagtaactgttatctcttttttaactaaccaactaactatatacctattaatacatcgtaattatagttcttaacatctattaatcattaattcgcttctttaattttttataaactaacattgttaattgaaaagggataacatgttacagaatataaattatatatggatttttttaaaaaggaaatacttgactggagtatatatttatctcttcattatatagcacgcgtgttttccaatttttccacatcccatataatacaggattataatctcgttcgaacatacgagaaagtggataaaacaatagttgattttttatctaggttgccaaatttattccatattttagaatatggggaaaatattctacatatttattctatggatgatgctaatacgaatattataattttttttctagatagagtattaaatattaataagaacgggtcatttatacacaatctcaggttatcatcatccattaatataaaagaatatgtatatcaattagttaataatgatcatccagataataggataagactaatgcttgaaaatggacgtagaacaagacattttttgtcctatatatcagatacagttaatatctatatatgtattttaataaatcatggattttatatagatgccgaagacagttacggttgtacattattacatagatgtatatatcactataagaaatcagaatcagaatcatacaatgaattaattaagatattgttaaataatggatcagatgtagataaaaaagatacgtacggaaacacaccttttatcctattatgtaaacacgatatcaacaacgtggaattgtttgagatatgtttagagaatgctaatatagactctgtagactttaatagatatacacctcttcattatgtctcatgtcgtaataaatatgattttgtaaagttattaatttctaaaggagcaaatgttaatgcgcgtaatagattcggaactactccattttattgtggaattatacacggtatctcgcttataaaactatatttggaatcagacacagagttagaaatagataatgaacatatagttcgtcatttaataatttttgatgctgttgaatctttagattatctattatccagaggagttattgatattaactatcgtactatatacaacgaaacatctatttacgacgctgtcagttataatgcgtataatacgttggtctatctattaaacagaaatggtgattttgagacgattactactagtggatgtacatgtatttcggaagcagtcgcaaacaacaacaaaataataatggaagtactattgtctaaacgaccatctttgaaaattatgatacagtctatgatagcaattactaaacataaacagcataatgcagatttattgaaaatgtgtataaaatatactgcgtgtatgaccgattatgatactcttatagatgtacagtcgctacagcaatataaatggtatattttaaaatgtttcgatgaaatagatatcatgaagagatgttatataaaaaataaaactgtattccaattagttttttgtatcaaagacattaatactttaatgagatacggtaaacatccttctttcgtgaaatgcactagtctcgacgtatacggaagtcgtgtacgtaatatcatagcatctattagatatcgtcagagattaattagtctattatccaagaagctggatcctggagataaatggtcgtgttttcctaacgaaataaaatataaaatattggaaaactttaacgataacgaactatccacatatctaaaaatcttataaacactattaaaatataaaatctaagtaggataaaatcacactacatcattgtttccttttagtgctcgacagtgtatactatttttaacactcataaataaaaatgaaaacgatttccgttgttacgttgttatgcgtactacctgctgttgtttattcaacatgtactgtacccactatgaataacgctaaattaacgtctaccgaaacatcgtttaatgataaacagaaagttacgtttacatgtgatcagggatatcattcttcggatccaaatgctgtctgcgaaacagataaatggaaatacgaaaatccatgcaaaaaaatgtgcacagtttctgattacatctctgaattatataataaaccgctatacgaagtgaattccaccatgacactaagttgcaacggcgaaacaaaatattttcgttgcgaagaaaaaaatggaaatacttcttggaatgatactgttacgtgtcctaatgcggaatgtcaacctcttcaattagaacacggatcgtgtcaaccagttaaagaaaaatactcatttggggaatatatgactatcaactgtgatgttggatatgaggttattggtgcttcgtacataagttgtacagctaattcttggaatgttattccatcatgtcaacaaaaatgtgatatgccgtctctatctaatggattaatttccggatctacattttctatcggtggcgttatacatcttagttgtaaaagtggttttacactaacggggtctccatcatccacatgtatcgacggtaaatggaatcccgtactcccaatatgtgtacgaactaacgaagaatttgatccagtggatgatggtcccgacgatgagacagatttgagcaaactctcgaaagacgttgtacaatatgaacaagaaatagaatcgttagaagcaacttatcatataatcatagtggcgttaacaattatgggcgtcatatttttaatctccgttatagtattagtttgttcctgtgacaaaaataatgaccaatataagttccataaattgctaccgtaaatataaatccgttaaaataatgaataattaataacgaacaagtatcaaaagattaaagaattatagctagaatcaattgagatgtcttcttcagtggatgttgatatctacgatgccgttagagcatttttactcaggcactattataacaagagatttattgtgtatggaagaagtaacgccatattacataatatatacaggctatttacaagatgcgccgttataccgttcgatgatatagtacgtactatgccaaatgaatcacgtgttaaacaatgggtgatggatacacttaatggtataatgatgaatgaacgcgatgtttctgtaagcgttggcaccggaatactattcatggaaatgtttttcgattacaataaaaatagtatcaacaatcaactaatgtatgatataattaatagcgtatctataattctagctaatgagagatatagaagcgcttttaacgacgatggtatatacatccgtagaaatatgattaacaagttgtacggatacgcatctctaactactattggcacgatcgctggaggtgtttgttattatctgttgatgcatctagttagtttgtataaataattatttcaatatactagttaaaattttaagattttaaatgtataaaaaactaataacgtttttatttgtaataggtgcattagcatcctattcgaataatgagtacactccgtttaataaactgagtgtaaaactctatatagatggagtagataatatagaaaattcatatactgatgataataatgaattggtgttaaattttaaagagtacacaatttctattattacagagtcatgcgacgtcggatttgattccatagatatagatgttataaacgactataaaattattgatatgtataccattgactcgtctactattcaacgcagaggtcacacgtgtagaatatctaccaaattatcatgccattatgataagtacccttatattcacaaatatgatggtgatgagcgacaatattctattactgcagagggaaaatgctataaaggaataaaatatgaaataagtatgatcaacgatgatactctattgagaaaacatactcttaaaattggatctacttatatatttgatcgtcatggacatagtaatacatattattcaaaatatgatttttaaaaatttaaaatatattatcacttcagtgacagtagtcaaataacaaacaacaccatgagatatattataattctcgcagttttgttcattaatagtatacacgctaaaataactagttataagtttgaatccgtcaattttgattccaaaattgaatggactggggatggtctatacaatatatcccttaaaaattatggcatcaagacgtggcaaacaatgtatacaaatgtaccagaaggaacatacgacatatccgcatttccaaagaatgatttcgtatctttctgggttaaatttgaacaaggcgattataaagtggaagagtattgtacgggactatgcgtcgaagtaaaaattggaccaccgactgtaacattgactgaatacgacgaccatatcaatttgtacatcgagcatccgtatgctactagaggtagcaaaaagattcctatttacaaacgcggtgacatgtgtgatatctacttgttgtatacggctaacttcacattcggagattctaaagaaccagtaccatatgatatcgatgactacgattgcacgtctacaggttgcagcatagactttgtcacaacagaaaaagtgtgcgtgacagcacagggagccacagaagggtttctcgaaaaaattactccatggagttcgaaagtatgtctgacacctaaaaagagtgtatatacatgcgcaattagatccaaagaagatgttcccaatttcaaggacaaaatggccagagttatcaagagaaaatttaataaacagtctcaatcttatttaactaaatttctcggtagcacatcaaatgatgttaccacttttcttagcatgcttaacttgactaaatattcataactaatttttattaatgatacaaaaacgaaataaaactgcatattatacactggttaacgcccttataggctctaaccattttcaagatgaggtccctgattatagtccttctgttcccctctatcatctactccatgtctattagacaatgtgagaagactgaagaggaaacatggggattgaaaatagggttgtgtataattgccaaagatttctatcccgaaagaactgattgcagtgttcatctcccaactgcaagtgaaggattgataactgaaggcaatggattcagggatatacgaaacaccgataaattataaaaaaagcaatgtgtccgctgtttccgttaataatactattttcgtaactggcggattattcataaataactctaatagcacgatcgtggttaacaatatggaaaaacttgacatttataaagacaaacaatggtcgattatagaaatgcctatggctagggtatatcacggcatcgactcgacatttggaatgttatattttgccggaggtctatccgttaccgaacaatatggtaatttagagaaaaacaacgagatatcttgttacaatcctagaacgaataagtggtttgatatttcatatactatttataagatatccatatcatcattgtgtaaactaaataacgtcttctatgtatttagtaaggacattggatatgtggaaaagtatgatggtgcatggaagttagtacatgatcgtctccccgctataaaggcattatcaacttctccttattgattgaaaatgaaaatataaatagtttttatgtatagcagtattaccctatagttttattgcttactactaacatggatacagatgttacaaatgtagaagatatcataaatgaaatagatagagagaaagaagaaatactaaaaaatgtagaaattgaaaataataaaaacattaacaagaatcatccaagtggatatattagagaagcactcgttattaataccagtagtaatagtgattccattgataaagaagttatagaatgtatctgtcacgatgtaggaatatagatcatatctactaatttttataatcgatacaaaacataaaaaacaactcgttattacatagcaggcatggaatccttcaagtattgttttgataacgatggcaagaaatggattatcggaaatactttatattctggtaattcaatactatataaggtcagaaaaaatttcactagttcgttctacaattacgtaatgaagatagatcacaaatcacacaagccattgttgtctgaaatacgattctatatatctgtattggatcctttgactatcgacaactggacacgggaacgtggtataaagtatttggctattccagatctgtatggaattggagaaaccgatgattatatgttcttcgttataaagaatttgggaagagtattcgccccaaaggatactgaatcagtcttcgaagcatgcgtcactatgataaacacgttagagtttatacactctcaaggatttacccatggaaaaatagaaccgaggaatatactgattagaaataaacgtctttcactaattgactattctagaactaacaaactatacaagagtggaaactcacatatagattacaacgaggacatgataacttcaggaaatatcaattatatgtgtgtagacaatcatcttggagcaacagtttcaagacgaggagatttagaaatgttgggatattgcatgatagaatggttcggtggcaaacttccatggaaaaacgaaagtagtataaaagtaataaaacaaaaaaaagaatataaaaaatttatagctactttctttgaggactgttttcctgaaggaaatgaacctctggaattagttagatatatagaattagtatacacgttagattattctcaaactcctaattatgacagactacgtaaactgtttatacaagattgaaattatattcttttttttatagagtgtggtagtgttacggatatttaatattagactatctctatcgcgctacacgaccaatatcgattactatggatatcttcagggaaatcgcatcttctatgaaaggagagaatgtattcatttctccagcgtcaatctcgtcagtattgacaatactgtattatggagctaatggatccactgctgaacagctatcaaaatatgtagaaaaggaggagaacatggataaggttagcgctcaaaatatctcattcaaatccataaataaagtatatgggcgatattctgccgtgtttaaagattcctttttgagaaaaattggcgataagtttcaaactgttgacttcactgattgtcgcactatagatgcaatcaacaagtgtgtagatatctttactgaggggaaaatcaatccactattggatgaaccattgtctcctgatacctgtctcctagcaattagtgccgtatactttaaagcaaaatggttgacgccattcgaaaaggaatttaccagtgattatcccttttacgtatctccgacggaaatggtagatgtaagtatgatgtctatgtacggcaaggcatttaatcacgcatctgtaaaggaatcattcggcaacttttcaatcatagaactgccatatgttggagatactagtatgatggtcattcttccagacaagattgatggattagaatccatagaacaaaatctaacagatacaaattttaagaaatggtgtaactctctggaagctacgtttatcgatgttcacattcccaagtttaaggtaacaggctcgtataatctggtggatactctagtaaagtcaggactgacagaggtgttcggttcaactggagattatagcaatatgtgtaattcagatgtgagtgtcgacgctatgatccacaaaacgtatatagatgtcaatgaagagtatacagaagcagctgcagcaacttgtgcactggtgtcagactgtgcatcaacaattacaaatgagttctgtgtagatcatccgttcatctatgtgattaggcatgttgatggaaaaattcttttcgttggtagatattgctctccgacaactaattgttaaccattttttttaaaaaatagaaaaaacatgtggtattagtgcaggtcgttattcttccaattgcaattggtaagatgacggccaactttagtacccacgtcttttcaccacagcactgtggatgtgacagactgaccagtattgatgacgtcagacaatgtttgactgaatatatttattggtcgtcctatgcataccgcaacaggcaatgcgctggacaattgtattccacactcctctcttttagagatgatgcggaattagtgttcatcgacattcgcgagctggtaaaaaatatgccgtgggatgatgtcaaagattgtgcagaaatcatccgttgttatataccggatgagcaaaaaaccatcagagagatttcggccatcatcggactttgtgcatatgctgctacttactggggaggtgaagaccatcccactagtaacagtctgaacgcattgtttgtgatgcttgagatgctcaattacgtggattataacatcatattccggcgtatgaattgatgagttgtacatcttgacattttcttctttcttctcttctccctttcccagaaacaaactttttttacccactataaaataaaatgagtatactacctgttatatttctttctatatttttttattcttcattcgttcagacttttaacgcgcctgaatgtatcgacaaagggcaatattttgcatcattcatggagttagaaaacgagccagtaatcttaccatgtcctcaaataaatacgctatcatccggatataatatattagatattttatgggaaaaacgaggagcggataatgatagaattataccgatagataatggtagcaatatgctaattctgaacccgacacaatcagactctggtatttatatatgcattaccacgaacgaaacctactgtgacatgatgtcgttaaatttgacaatcgtgtctgtctcagaatcaaatatagatcttatctcgtatccacaaatagtaaatgagagatctactggcgaaatggtatgtcccaatattaatgcatttattgctagtaacgtaaacgcagatattatatggagcgggcatcgacgccttagaaataagagacttaaacaacggacacctggaattattaccatagaagatgttagaaaaaatgatgctggttattatacatgtgttttagaatatatatacggtggcaaaacatataacgtaaccagaattgtaaaattagaggtacgggataaaataataccttctactatgcaattaccagatggcattgtaacttcaataggtagtaatttgactattgcatgcagagtatcgttgagacctcccacaacggatgcagacgtcttttggataagtaatggtatgtattacgaagaagatgatggggacggaaacggtagaataagtgtagcaaataaaatctatatgaccgataagagacgtgttattacatcccggttaaacattaatcctgtcaaggaagaagatgctacaacgtttacgtgtatggcgtttactattcctagcatcagtaaaacagttactgttagtataacgtgaatgtatgttgttacatttccatgtcaattgagtttataagaatttttatacattatcttccaacaagcaattgacgaacgtattgctatgattaactcccacgatactatgcatattattaatcattaacttgcagactatacctagagctattttgacatactcgtgttcttgtgtaattgcagtatctatattattaaagtacgtaaatctagctatagttttattatttaattttagataatataccgtctccttatttttaaaaattgccacatcctttattaaatcatgaatgggaatttctatgtcatagttaatatattgtgaacaacaagagcagatatctataggaaagggtggaatgcgatacattgatctatgtagttttaaaacacacgcaaactttgaagaatttatataaatcattccatcgatacatccttctatgttgagatgtatatatccaggaattcgtttattaatatcgggaaatgtataaactaaaacattgcccggaagcggagcttctaccggagttatatcagtttttaacttacaaaatgtaaccaatacctttgcatgacttgttttgttcggcaacgttagtttaaacttgacgaatggattaattacaatagcatgatccgcgcatctattaagtttttttactttaacgcccttgtatgtttttacagagactttatctaaatttctagtgcttgtatgtgttataaatataacgggatatagaactgaatcacctaccttagatacccaattacattttatcagatccagataataaacaaattttgtcgccctaactaattctatattgttatatattttacaattggttatgatatcatgtaataacttggaatctaacgcacatcgtcgtacgtttatacaattgtgatttagtgtagtatatctacacatgtatttttccgcgctatagtattctggactagtgataaaactatcgttatatctgtcttcaatgaactcatcgagatattgctctctgtcatattcatacacctgcataaactttctagacatcttacaatccgtgttattttaggatcatatttacatatttacgggtatatcaaagatgttagattagttaatgggaatcgtctataataatgaatattaaacaattatatgaggacttttaccacaaagcatcataaaaatgagtcgtcgtctgatttatgttttaaatatcaaccgcgaatcaactcataaaatacaagagaatgaaatatatacatattttagtcattgcaatatagaccatacttctacagaacttgattttgtagttaaaaactatgatctaaacagacgacaacctgtaactgggtatactgcactacactgctatttgtataataattactttacaaacgatgtactgaagatattattaaatcatggagtggatgtaacgatgaaaaccagtagcggacgtatgcctgtttatatattgcttactagatgttgcaatatttcacatgatgtagtgatagatatgatagacaaagataaaaaccacttattacatagagactattccaacctattactagagtatataaaatctcgttacatgttattaaaggaagaggatatcgatgagaacatagtatccactttattagataagggaatcgatcctaactttaaacaagacggatatacagcgttacattattattatttgtgtctcgcacacgtttataaaccaggtgagtgtagaaaaccgataacgataaaaaaggccaagcgaattatttctttgtttatacaacatggagctaatctaaacgcgttagataattgtggtaatacaccattccatttgtatcttagtattgaaatgtgtaataatattcatatgactaaaatgctgttgacttttaatccgaatttcgaaatatgtaataatcatggattaacgcctatactatgttatataacttccgactacatacaacacgatattcttgttatgttaatacatcactatgaaacaaatgttggagaaatgccgatagatgagcgtcgtataatcgtattcgagtttatcaaaacatattctacacgtcctgcagattcgataacttatttgatgaataggtttaaaaatatagatatttatacccgctatgaaggaaagacattattacacgtagcatgtgaatataataatacacacgtaatagattatcttatacgtatcaacggagatataaatgcgttaaccgacaataacaaacacgctacacaactcattatagataacaaagaaaattccccatataccattaattgtttactgtatatacttagatatattgtagataagaatgtgataagatcgttggtggatcaacttccatctctacctatcttcgatataaaatcatttgagaaattcatatcctactgtatacttttagatgacacattttacaatagacacgttaggaatcgcgattctaaaacgtatcgatacgcattttcaaaatacatgtcgtttgataaatacgatggtataataactaaatgtcataaagaaacaatattgctcaaactatccactgttctagacactacactatatgcagttttaagatgccataattcgaaaaagttaagaagatacctcaccgagttaaaaaaatataataacgataagtcctttaaaatatattctaatattatgaatgagagataccttaatgtatattataaagatatgtacgtgtcaaaggtatatgataaactatttcctgttttcacagataaaaattgtctactaacattactaccttcagaaattatatacgaaatattatacatgctgacaattaacgatctttataatatatcgtatccacctaccaaagtatagttgtatttttctcatgcgatgtgtgtaaaaaaactgatattatataaatattttagtgccgtataataaagatgacgatgaaaatgatggtacatatatatttcgtatcattattgttattgctattccacagttacgccatagacatcgaaaatgaaatcacagaattcttcaataaaatgagagatactctaccagctaaagactctaaatggttgaatccagcatgtatgttcggaggcacaatgaatgatatagccgctctaggagagccattcagcgcaaagtgtcctcctattgaagacagtcttttatcgcacagatataaagactatgtggttaaatgggaaaggctagaaaaaaatagacggcgacaggtttctaataaacgtgttaaacatggtgatttatggatagccaactatacatctaaattcagtaaccgtaggtatttgtgcaccgtaactacaaagaatggtgactgtgttcagggtatagttagatctcatattagaaaacctccttcatgcattccaaaaacatatgaactaggtactcatgataagtatggcatagacttatactgtggaattctttacgcaaaacattataataatataacttggtataaagataataaggaaattaatatcgacgacattaagtattcacaaacgggaaaggaattaattattcataatccagagttagaagatagcggaagatacgactgttacgttcattacgacgacgttagaatcaagaatgatatcgtagtatcaagatgtaaaatacttacggttataccgtcacaagaccacaggtttaaactaatactagatccaaaaatcaacgtaacgataggagaacctgccaatataacatgcactgctgtgtcaacgtcattattgattgacgatgtactgattgaatgggaaaatccatccggatggcttataggattcgattttgatgtatactctgttttaactagtagaggcggtattaccgaggcgaccttgtactttgaaaatgttactgaagaatatataggtaatacatataaatgtcgtggacacaactattattttgaaaaaacccttacaactacagtagtattggagtaaatatacaatgcatttttatatacattactgaataattattattattatttatatcgtatttgtgctataacgcgactatctaggtatttgtatctcaccgatagagaacatataaatgtagactctattaaacagttgtgtaaaatatcagatcctaatgcatgttatagatgtggatgtacggctttacatgagtacttttataattatagatcagtcaacggaaaatacaagtatagatacaacggttactatcaatattatttatctagcgattatgaaaattataatgaatattattatgatgattatgatagaactggtatgaacagtgagagtgataatatatcaatcaaaacagaatatgaattctatgatgaaacacaagatcaaagtacacaactagtaggttacgacattaaactcaaaaccaatgaggatgattttatggctatgatagatcagtgggtgtccatgattatatagatgaatcaattaataaagtagtatatggaagagagtctcacgtaagatggcgggatatatggcaagaacataatgatggcgtatacagtataggaaaggagtgcatagataatatatacgaagacaaccataccgtagacgaattctacaagatagacagcgtatcagatgtagatgacgcggaacacatatctccgataactaatgatgtatctacacaaacatgggaaaagaaatcagagttagatagatacatggaaatgtatcctcgtcatagatatagtaagcattctgtctttaagggattttctgacaaagttagaaaaaatgatttagacatgaatgtggtaaaagaattactttctaacggtgcatctctaacaattaaggatagcagtaataaggatccaataaccgtttattttcgaagaacgataatgaatttagaaatgattgatgaacgaaagtatatagtacactcctatctaaaaaattataaaaatttcgattatccatttttcaggaagttagttttgactaataaacattgtctcaacaattattataatataagcgacagcaaatatggaacaccgctacatatattggcgtctaataaaaaattaataactcctaattacatgaagttattagtgtataacggaaatgatataaacgcacgaggtgaagatacacaaatgcgaactccattacacaaatatttgtgtaaatttgtatatcataatattgaatatggtatccgatactataatgaaaagattatagacgcatttatagagttaggagccgatctaactattccaaatgacgatggaatgataccagtagtttactgtatacactcaaatgccgaatatggttataacaatattactaacataaagataatacgtaaactacttaatcttagtagacgtgcgtcacataatctatttagagatcgagtcatgcacgattatataagtaatacatatattgatcttgagtgtttagatattattagatcgttggatggattcgatatcaatggttactttgaaggacgtacaccacttcattgcgctatacaacataacttcactcagattgctaagtacttattagatcgaggagctgatatagtcgtacccaacacattgattatacatcagtacatacagtaaatagcatagatatggaggaggatacaaatatttcaaataaagttataaggtacaacactgtcaataatatatgggaaacattacctaacttctggactggaactataaatccaggcgtggtctcgcataaagatgatatatatgttgtatgcgacatcaaagatgaaaaaaatgttaaaacttgtatatttagatataacacgaatacgtataacggatgggaattggtcacgacgacagaaagcagattatcagctctgcatactattctttataacaataccataatgatgttacattgttatgaatcgtatatgttacaagatacatttaatgtgtacactcgcgaatggaatcatatgtgtcatcaacattcgaatagttatatcatgtacaatatactacccatctactaaatataatagaataaaataaatgagtatgatcattttagataacgattgattttatcattaccgcttcattcttatattctttgcttacggaacctatatttagaaacatctactaacgattttttatgcttgcattattaatggtatgtaatatgattgattgtgtacgcaataccaatttgttaagtatgaatacggggtacaaacataaactgaagtttaacattatttatttatgatatatatcgttattgtttggtctataccatggatatctttaaagaactaatcttaaaacacacggatgaaaatgttttgatttctccagtttctattttatctactttatctattctaaatcatggagcagctggttctacagctgaacaactatcaaaatatatagagaatatgaatgagaatacacccgatgacaataatgacatggacgtagatattccgtattgtgcgacactagctaccgcaaataaaatatacggtagcgatagtatcgagttccacgcctccttcctacaaaaaataaaagacgattttcaaactgtaaactttaataatgctaaccaaacaaaggaactaatcaacgaatgggttaagacaatgacaaatggtaaaattaattccttattgactagtccgctatccattaatactcgtatgacagttgttagcgccgtccattttaaagcaatgtggaaatatccattttctaaacatcttacatatacagacaagttttatatttctaagaatatagttaccagtgttgatatgatggtgagcactgagaataacttgcaatatgtacatattaatgaattattcggaggattctctattatcgatattccatacgagggaaactctagtatggtaattatactaccggacgacatagaaggtatatataacatagaaaaaaatataacagatgaaaaatttaaaaaatggtgtggtatgttatctactaaaagtatagacttgtatatgccaaagtttaaagtggaaatgacagaaccgtataatctggtaccgattttagaaaatttaggacttactaatatattcggatattatgcagattttagcaagatgtgtaatgaaactatcactgtagaaaaatttctacatacgacgtttatagatgttaatgaggagtatacagaagcatcggccgttacaggagtatttatgactaacttttcgatggtatatcgtacgaaggtctacataaaccatccattcatgtacatgattaaagacaacacaggacgtatactttttatagggaaatactgctatccgcaataaatataaacaaatagacttttatcacgtttatctatgtctaaatattacaaatagtaatagtataaactaaagctgataatacttaaaaaaataataatatcatttacaattaatagtataaactaaaaattaaacaaatcgttattataagtaatatcaaaatgatgatatacggattaatagcgtgtcttatattcgtgacttcatccatcgctagtccactttatattcccgttattccacccatttcggaagataaatcgttcaatagtgtagaggtattagtttccttgtttagagatgaccaaaaagactatacggtaacttctcagttcaataactacactatcgataccaaagactggactatcggcgtactatccacacctgatggtttggatataccattgactaatataacttattggtcacggtttactataggtcgtgcattgttcaaatcagagtctgaggatattttccaaaagaaaatgagtattctaggtgtttctatagaatgtaagaagtcgtcgacattacttacttttttgaccgtgcgtaaaatgactcgagtatttaataaatttccagatatggcttattatcgaggagactgtttaaaagccgtttatgtaacaatgacttataaaaatactaaaactggagagactgattacacgtacctctctaatggggggttgcctgcatactatcgtaatggggtcgatggttgattattgattagtatattccttattctttttattcacacaaaaagaacatttttataaacatgaaaccactgtctaaatgtaattatgatcttgatttatagatgaagatcagcctttagaggattttaaccagtatgtttaatatgaaaaaaataaacataacatattttgagattaagcgctattgtgcaagattatattagaatcaaattaatctttcatacgagaaaaataacgacatacgtcgtcaacaaattaaactttttatttattagttaactagcttatagaacttgctcattgttatgtttctaaaacgggtacgacatataggacaattatccgacgcaccggtttctcttcgtgttttatgccatatattgatgcatgttatgcaaaatatatgagtacacgaatccaataaaccaaagtatctatcgttttgagtaaacaacttcatagcaaattccacattctttttctttacttactctatacacgtcctcgtatttatccagtattttgatgatatccaactcagaaatggttgttgtattattgggtgtattgggagtataggtattattagctatgtaccaatttaccaaccctcttaatattgattgaacaatcacatcggttatccaatcaataaccacattaataactaaattgtagtgtatatatagaccatatatgtttctatttttttgacagttacgtatagtttcagtaagttttgattgttgtattcctgtatctctagataagttagtcatatagtcccttccggcgatacgttttttccaagcccgaaattgattagccaaatgtgtatttatttttgtgatattgatataatatgtaatgttattaatatttcggataatgcatactgttagtcttatatcatttggttcatctatgtattgtaatattgttacatgatctatagatgatgtattgattttggcaggatcgaattccatatccgcgactaaacagtgaaaaaaatgtaaatactttttaaattttaaattagtaaaacttttttttattttttatgattccaaaaatactgaatacaaagtcctaaattataaatatggagatcatactaccacaacttattattatgcatactcagccggtgtaatagatagatatatataattctattacaccggcagacaattaccgatcggtatttgtcgttaccaacataccgtataatatgtaatatacaattccataacccattgacagttgttatacatcaaaattgcaattcttttgattacgatgttataagaatgtagttaattgatgtatgatgttaatgtgtcctctttcctcttataacatcgtaatcaaaaacttttttataatatatacctaataatgtgtcttaatagttctcgtgattcgtcaaacaatcattcttataaaatataataaagcaacgtaaaacacataaaaataagcgtaactaataagacaatggatatttacgacgataaaggtctacagactattaaactgtttaataatgaatttgattgtataaggaatgacatcagagaattatttaaacatgtaactgattccgatagtatacaacttccgatggaagacaattctgatattatagaaaatatcagaaaaatactatatagacgattaaaaaatgtagaatgtgttgacatcgatagtacaataacttttatgaaatacgatccaaatgatgataataagcgtacgtgttctaattgggtacccttaactaataactatatggaatattgtctagtaatatatttggaaacaccgatatgtggaggcaaaataaaattataccaccctacaggaaatataaagtcggataaggatattatgtttgcaaagactctagactttaaatcaaagaaagtgttaactggacgtaaaacaattgccgttctagacatatccgtttcatataatagatcaatgactactattcactacaacgacgacgttgatatagatatacatactgataaaaatggaaaagagttatgttattgttatataacaatagatgatcattacttggttgatgtggaaactataggagttatagtcaatagatctggaaaatgtctgttagtaaataaccatctaggtataggtatcgttaaagataaacgtataagcgatagttttggagatgtatgtatggatacaatatttgacttttctgaagcacgagagttattttcattaactaatgatgataacaggaatatagcatgggacactgataaactagacgatgatacagatatatggactcccgtcacagaagatgattacaaatttctttctagactagtattgtatgcaaaatctcaatcggatactgtattcgactattatgttcttactggtgatacggaaccacccactgtattcattttcaaggtaactagattttactttaatatgccgaaataaaaaatttttgtataatatctagaggtagaggtattgtttagataaatacaaataacatagatacatcgcatacttagcatttttataaatatacataagacatacactttatacattttttttgtaaaaatactcataaaaaaatttataaaaattatggcacaaccatatcttgtataggtagtttagttcgtcgagtgaacctataaacagataatagacaacacgtaataataataatgcctactaatacaagcataataccgggagatgggatatatgacgttgtagtgtttgggttttctgaacgttgatagtctactaatactacatgctgacatctaatgcctgtataaccatgagagcatctacaatacataccgtcaatatctctagcgtggatacagtcaccgtgtaaacaatatccatctccctctggaccgcataatctgatagctggaatatctgttgtagcgtttgtaatttctggcgatgtcgtttcgatagcgttaccactatcggcgaatgatctgattatcatagcagcgaacaacaacatcagatatttcatcgacatttttgatggattttgtgtttatgctgtttctcagtgtgtgtttatgacaagattgggaattttatattattaattcagtaatataaactaataatatattgttaattgtgtaaataatataaaaataacaatacaatattgaatgtgttgctgttaaaaatgatcataaacacggagtttattttatatgtctcgcataaacattactaaaaaaatatattgttctgtttttctttcacatctttaattatgaaaaagtaaatcattatgagatggacgagattgtacgcatcgttcgcgacagtatgtggtacatacctaacgtatttatggacgacggtaagaatgaaggtcacgtttctgtcaacaatgtctgtcatatgtatttcacgttctttgatgtggatacatcgtctcatctgtttaagctagttattaaacactgcgatctgaataaacgaggtaactctccattacattgctatacgatgaatacacgatttaatccatctgtattaaagatattgttacaccacggcatgcgtaactttgatagcaaggatgaaaaaggacaccactatcaatcgataacaagatctttgatatactaacggacaccattgatgactttagtaaatcatccgatctattgctgtgttatcttagatataaattcaatgggagcttaaactattacgttctgtacaaaggatccgacgaggatgaactcacttctcttcattactactgtaaacacatatccacgttctacaaaagcaattattacaagttaagtcacactaagatgcgagccgagaagcgattcatctacgcgataatagattatggagcaaacattaacgcggttacacacttaccttcaacagtataccaaacatagtcctcgtgtggtgtatgctcttttatctcgaggagccgatacgaggatacgtaataatcttgattgtacacccatcatggaacgattgtgcaacaggtcatattctcataatgttactcaattggcacgaacaaaaggaagaaggacaacatctactttatctattcataaaacataatcaaggatacactctcaatatactacggtatctactagataggttcgacattcagaaagacgaatactataataccgcctttcaaaattgtaacaacaatgttgcctcatacatcggatacgacatcaaccttccgactaaagacggtattcgacttggtgtttgaaaacagaaacatcatatacaaggcggatgttgtgaatgacatcatccaccacagactgaaagtatctctacctatgattaaatcgttgttctacaagatgtctctccctacgacgattactacgtaaagaagataatagcctactgcctattaagggacgagtcattcgcggaactacatagtaaattctgtttaaacgaggactataaaagtgtatttatgaaaaatatatcattcgataagatagattccatcatcgtgacataagtcgccttaaagagattcgaatctccgacaccgacctgtatacggtatcacagctatcttaaagccatacattcagacagtcacatttcatttcccatgtacgacgatctcatagaacagtgccatctatcgatggagcgtaaaagtaaactcgtcgacaaagcactcaataaattagagtctaccatcggtcaatctagactatcgtatttgcctccggaaattatgcgcaatatcatctaaacagtatgttgtacgaaaagaaccattacaaatattatccatgatagaaagaaaatatctatatgattggagaagtaggaaacaggaacaagacgacgattactacattattaaatcatgaagtccgtattatactcgtatatattgtttctctcatgtataataataaacggaagagatatagcaccgcatgcaccatccgatggaaagtgtaaagacaacgaatacaaacgccataatttgtgtccgggaacatacgcttccagattatgcgatagcaagactaacacacaatgtacgccgtgtggttcgggtaccttcacatctcgcaataatcatttacccgcttgtctaagttgtaacggaagacgcgaccgtgtaacacgactcacaatagaatctgtgaatgctctcccggatattattgtcttctcaaaggatcatccggatgcaaggcatgtgtttcccaaacaaaatgtggaataggatacggagtatccggagacgtcatctgttctccgtgtggtctcggaacatattctcacaccgtctcttccgcagataaatgcgaacccgtacccagtaatacctttaactatatcgatgtggaaattaatctgtatccagttaacgaccactaccggtctcagcgaatccatctcaacgtcggaactaactattactatgaatcataaagactgtaatcccgtatttcgtgaggaatacttctccgtccttaataaggtagcaacttcaggtttctttacaggagaaaggtgtgcactctgaatttcgagattaaatgcaataacaaaaatttttcctccaaacagttaacgaaagcaaagaatgatgacggtatcatgccgcattcggagactgtctatctagcgtcgacatctatatactatatagtaataccaatactcaagactacgaaactgatacaatctcttatcatgtgggtaatgttctcgatgtcgatagccatatgcccggtagttgcgatatacataaactgatcactaattccaaacccacccgctttttatagtaagtttttcacccataaataataaatacaataattaatttctcgtaaaagtagaaaatatattctaatttattgcacggtaaggaagtagaatcataaagaacagtactcaatcaatagcaatcatgaaacaatatatcgtcctggcatgcatgtgcctgccagtcttcagcaatcatcctcatcctcctcctcgtgtacggaagaagaaaacaaacatcatatgggaatcgatgttattatcaaagtcacaaagcaagaccaaacaccgaccaatgataagatttgccaatccgtaacggaaattacagagtccgagtcagatccagatcccgaggtggaatcagaagatgattccacatcagtcgaggatgtagatcctcctaccacttattactccatcatcggtggaggtctgagaatgaactttggattcaccaaatgtcctcagattaaatccatctcagaatccgctgatggaaacacagtgaatgctagattgtccagcgtgtccccaggacaaggtaaggactctcccgcgatcactcatgaagaagctctggctatgatcaaagactgtgaggtgtctatcgacatcagatgtagcgaagaagagaaagacagcgacatcaagacccatccagtactcgggtctaacatctctcataagaaagtgagttacgaagatatcatcggttcaacgatcgtcgatacaaaatgtgtcaagaatctagagtttagcgttcgtatcggagacatgtgcaaggaatcatctgaacttgaggtcaaggatggatttaagtatgtcgacggatcggcatctgaaggtgcaaccgatgatacttcactcatcgattcaacaaaactcaaagcgtgtgtctgaatcgataactctattcatctgaaattggatgagtagggttaatcgaacgattcaggcacaccacgaattaaaaaagtgtaccggacactatattccggtttgcaaaacaaaaatgttcttaactacattcacaaaaagttacctctcgcgacttcttctttttctgtctcaatagtgtgatacgattatgacactattcctattcctattcctatttcctttcagggtatcacaaaaatattaaacctctttctgatggtctcataaaaaaagttttacaaaaatatttttattctctttctctctttgatggtctcataaaaaaagttttacaaaaatatttttattctctttctctctttgatggtctcataaaaaaagttttacaaaaatatttttattctctttctctctttgatggtctcataaaaaaagttttacaaaaatatttttattctctttctctctttgatggtctcataaaaaaagttttacaaaaatatttttattctctttctctctttgatggtctcataaaaaaagttttacaaaaatatttttattctctttctctctttgatggtctcataaaaaaagttttacaaaaatatttttattctctttctctctttgatggtctcataaaaaaagttttacaaaaatatttttattctctttctctctttgatggtctcataaaaaatattaaacctctttctgatggtgtcactaaaatatttttattctcattctcattttctctttctctcttcaatggagtcataaaatatttttattctctttctctcttcgatggtctcacaaaaatattaaacctctttctgatggtgtcactaaaatatttttattctcattctcattttctctttctctcttcaatggagtcataaaatatttttattctctttctctcttcgatggtctcacaaaaatattaaacctctttctgatggagtcgtaaaaaagttttatctctttctctcttcgatggtctcacaaaaatattaaacctctttctgatggagtcgtaaaaaagttttatctctttctctcttcgatggtctcacaaaaatattaaacctctttctgatggagtcgtaaaaaagttttatctctttctctcttcgatggtctcacaaaaatattaaacctctttctgatggagtcgtaaaaaagttttatctctttctctcttcgatggtctcacaaaaatattaaacctctttctgatggagtcgtaaaaaagttttatctctttctctcttcgatggtctcacaaaaatattaaacctctttctgatggagtcgtaaaaaagttttatctctttctctcttcgatggtctcacaaaaatattaaacctctttctgatggagtcgtaaaaaagttttatctctttctctcttcgatggtctcacaaaaatattaaacctctttctgatggagtcgtaaaaaagttttatctctttctctcttcgatggtctcacaaaaatattaaacctctttctgatggagtcgtaaaaaagttttatctctttctctcttcgatggtctcacaaaaatattaaacctctttctgatggagtcgtaaaaaagttttatctctttctctcttcgatggtctcacaaaaatattaaacctctttctgatggagtcgtaaaaaagttttatctctttctctcttcgatggtctcacaaaaatattaaacctctttctgatggagtcgtaaaaaagttttatctctttctctcttcgatggtctcacaaaaatattaaacctctttctgatggagtcgtaaaaaagttttatctctttctctcttcgatggtctcacaaaaatattaaacctctttctgatggagtcgtaaaaaagttttatctctttctctcttcgatggtctcacaaaaatattaaacctctttctgatggagtcgtaaaaaagttttatctctttctctcttcgatggtctcacaaaaatattaaacctctttctgatggagtcgtaaaaaagttttatctctttctctcttcgatggtctcacaaaaatattaaacctctttctgatggagtcgtaaaaaagttttatctctttctctcttcgatggtctcacaaaaatattaaacctctttctgatggagtcgtaaaaaagttttatctctttctctcttcgatggtctcactaaaatattttttattctctttctgatgcatcaactatttcttaaacaataacgtccaacaacatatactcgtcgagcttatcaacatcccctatgcccatctaggttaccagacaattgtatatcataaaataatgtttataatttacacgttaaaatcatataataaaacgtagatcgtataatattttttggtatataaatgatctagtaaaatccatgtaggggatactgctcacattttttctttggtacaaaatttcacacaagtttttatacagacaaattcttgtccatatattttaaaacattgacttttgtactaagaaaaatatctagatcaactatctctttctctttctctcttcgatggtctcacaaaaatattaaacctctttctgatggagtcgtaaaaaagttttatctctttctctcttcgatggtctcacaaaaatattaaacctctttctgatggagtcgtaaaaaagttttatctctttctctcttcgatggtctcacaaaaatattaaacctctttctgatggagtcgtaaaaaagttttatctctttctctcttcgatggtctcacaaaaatattaaacctctttctgatggagtcgtaaaaaagttttatctctttctctcttcgatggtctcacaaaaatattaaacctctttctgatggagtcgtaaaaaagttttatctctttctctcttcgatggtctcacaaaaatattaaacctctttctgatggagtcgtaaaaaagttttatctctttctccttcgatggtctcacaaaaatattaaacctctttctgatggagtcgtaaaaaagttttatctctttctctcttcgatggtctcacaaaaatattaaacctctttctgatggagtcgtaaaaaagttttatctctttctctcttcgatggtctcacaaaaatattaaacctctttctgatggagtcgtaaaaaagttttatctctttctccttcgatggtctcacaaaaatattaaacctctttctgatggagtcgtaaaaaagttttatctctttctccttcgatggtctcacaaaaatattaaacctctttctgatggagtcgtaaaaaagttttatctctttctctcttcgatggtctcacaaaaatattaaacctctttctgatggagtcgtaaaaaagttttatctctttctctcttcgatggtctcacaaaaatattaaacctctttctgatggtctctataaagcgatcgatctttcttacactctagagtttcctacagtcatgggtcacacatttttttctagacactaaataaaattagtaaaattaaattaattataaaattatatatataatttactaactttagttagataaattaataatatataagttttagtacattaatattatattttaaat

SEQ ID NO: 206 - DNA, 197965 bp, Artificial Sequence
  GLV-1h323
ttatgagaccatcaaagagagaaagagaataaaaatatttttgtaaaactttttttatgagaccatcaaagagagaaagagaataaaaatatttttgtaaaacttttttatgagaccatcaaagagagaaagagaataaaaatatttttgtaaaacttttttatgagaccatcaaagagagaaagagaataaaaatatttttgtaaaactttttttatgagaccatcaaagagagaaagagaataaaaatatttttgtaaaactttttttatgagaccatcaaagagagaaagagaataaaaatatttttgtaaaactttttttatgagaccatcaaagagagaaagagaataaaaatatttttgtaaaactttttttatgagaccatcaaagagagaaagagaataaaaatatttttgtaaaactttttttatgagaccatcaaagagagaaagagaataaaaatatttttgtaaaactttttttatgagaccatcaaagagagaaagagaataaaaatatttttgtaaaactttttttatgagaccatcaaagagagaaagagaataaaaatatttttgtaaaactttttttatgagaccatcaaagagagaaagagaataaaaatatttttgtaaaactttttttatgagaccatcaaagagagaaagagaataaaaatatttttgtaaaactttttttatgagaccatcaaagagagaaagagaataaaaatatttttgtaaaactttttttatgagaccatcaaagagagaaagagaataaaaatatttttgtaaaactttttttatgagaccatcagaaagaggtttaatatttttgtgatactctgaaaggaaataggaataggaataggaatagtgtcataatcgtatcacactattgagacagaaaaagaagaagtcgcgagaggtaactttttgtgaatgtagttaagaacatttttgttttgcaaaccggaatatagtgtccggtacacttttttaattcgtggtgtgcctgaatcgttcgattaaccctactcatccaatttcagatgaatagagttatcgattcagacacacgctttgagttttgttgaatcgatgagtgaagtatcatcggttgcaccttcagatgccgatccgtcgacatacttgaatccatccttgacctcaagttcagatgattccttgcacatgtctccgatacgaacgctaaactctagattcttgacgcattttgtatcgacgatcgttgaaccgatgatatcttcgtaactcactttcttatgagagatgttagacccgagtactggatgggtcttgatgtcgctgtctttctcttcttcgctacatctgatgtcgatagacacttcacagtctttgatcatagcaagagcttcttcatgagtgatcgcgggagagtccttaccttgtcctggggacacgctggacaatctagcattcactgtgtttccatcagcggattctgagatggatttaatctgaggacatttggtgaatccaaagttcattctcagacctccaccgatgatggagtaataagtggtaggaggatctacatcctcgactgatgtggaatcatcttctgattccacctcgggatctggatctgactcggactctgtaatttccgttacggattggcaaatcttatcattggtcggtgtttggtcttgctttgtgactttgataataacatcgattcccatatgatgtttgttttcttcttccgtacacgaggaggaggatgaggatgattgctgaagactggcaggcatagcagctgccgccaggcacatgcatgccaggacgatatattgtttcataattgctattgattgagtactgttctttatgattctacttccttaccgtgcaataaattagaatatattttctacttttacgagaaattaattattgtatttattatttatgggtgaaaaacttactataaaaagtgggtgggtttggaattagtgatcagtttatgtatatcgcaactaccgggcatatggctatcgacatcgagaacattacccacatgataagagattgtatcagtttcgtagtcttgagtattggtattactatatagtatatagatgtcgcccactagagttactgtctccgaatgcggcatgatagtatcattctttgctttcgttaactgtttggaggaagaatctttgttattgcatttaatctcgaaattcagagtgcacacctttctcctgtaaagaaacctgaagtcgctaccttattaagaacggagaagtatccatcacgaaatacgggattacagtctttatgattcatagtaatagttagttccgacgttgagatggattcgctgagaccggtagtggtcgtccgagtacacgacgtgtcgttaactggatacaggttaatttccacatcgatatagttaaacgtatttctgggtacgggttcgcatttatctgcggaagagacggtgtgagaatatgttccgagaccacacggagaacagatgacgtctccggatactccgtatcctattccacattttgtttgggaaacacatgccttgcatccggatgatcctttgagaagacaataatatccgggagagcattcacagattctattgtgagtcgtgttacacgatcgcgtcttccgttacaacttagacaagcgggtaaatgattattgcgagatgtgaaggtacccgaaccacacggcgtacatcgtgtgttagtcttgctatcgcataatctggaagcgtatgttcccggacacaaattatggcgtttgtattcgttgtctttacactttccatcggatggtgcatgcggtgctatatctcttccgtttattattatacatgagagaaacaatatatacgagtataatacggacttcatgatttaataatgtagtaatcgttgtcttgttcctgtttcctacttctccaatcatatagatattttctttctatcatggataatatttgtaatggttctttccgtacaacatactgtttagatgatattgcgcataatttccggaggcaaatacgatagtctagattgaccgatggtagactctaatttattgagtgctttgtcgacgagtttacttttacgctccatcgatagatggcactgttctatgagatcgtcgtacatgggaaatgaaatgtgactgtctgaatgtatggctttaagatagctgtgataccgtatacaggtcggtgtcggagattcgaatctctttgaggcgacttatgtcacgatgatggaatctatcttatcgaatgatatatttttcataaatacacttttatagtcctcgtttaaacagaatttactatgtagttccgcgaatgactcgtcccttaataggcagtaggctagtatcttttttacgtagtaatcgtcgtagggagagacatcttgtagaacaacgatttcgttttgttttctcttctgtaactgcttttctggatggccgtattgattatcgagcgtgatactcgctccatattccaataaccgctttgcaaattgtatattattgacatcgaccgcgtaatatagtagagttatcgatcatatctatatcatccatgtacttgcttagtatatcaaatacatctatcagtatggtttcataacagtgatacccgcaattattaaatctcgataatatcagaccgtacatacatagacggccattgttcgatacgtgatttacagccgcgtgtccatattttccacgataaaccttacgacgtttacatcgacgagattattattaacaaagtagtcgtgtagaggatagttgttgtccgttatctaacatgcatcgaacgaccatatcgccgtaatgtaagtagtttatcagtatggcttgtacgatggattcatcctgttgtctaaatctctttagaatgttatcgatgatgtagtggttatattctctggaatcgtacgaagtaatactacgcattacgtcgacaagagtatgacgtctctcaataagaagattaacgatttccatgtctacattatatggggttactctaaatcgcttgtttagataatacgcctctaatatagggctgacgtcgtatactctacacgtgtccacatcctttattaataataatttaacaatctctatatctatggttgagaaagaccagtagtattggatgggtaaagatcctccttcgtctctgccatggatggaaacattgttatcgatcaaacatttaattacatccttggatagagattgagattctctatgagacgatatatagtaatgaagagagttcttacacatatcactgtcgtacatacaggtacgaaatacgtaaccggtgctgtaacattctgatttaagaagccatagcaatacttctggtctcggattaggcgtcgttacgtatatatccaccaatccgagaccattgattgcataattcgtattcttggacggacgtatccgtttatccacaattaggtattttagcagacgtaagtcgatattatccgaatacagatcgaaatcatttatattcgacttgagttcgttagaggaatttgaatagctggatatcagtagatgcacaatctgagattttacgtatctatgcttactgtatactcctagcggagttaatccttcgttgtttctacaaagtctctcgactccgcgagagaacaatcttaatgtctgtatcgcatttattggagacgtaacaatgtagcgcattgtttcctcgtctatctatatgttttgataagttgtgacacgtttcaatttctagttttatttttttgtacgtcacatcttcatccagtagacgacatagaatagtgcactctctaccacaataatccatagctattctggtgctaattattcctatttcacgaaggcaatcattcctcataagatgataaaaagtgtagtggagatttagtatttagcagtgcggatatgatccaagagggtgagatagtcgttctcgttcagaatctttcgcagcataagtagtatgtcgatatacttatcgttgaagactctttataaaagtctatttgtttatatttattgcggatagcagtatttccctataaaaagtatacgtcctgtggtgtctttaatcatgtacatgaatggatggtttatgtagaccttcgtacgatataccatcgaaaagttaatcgtaaatactcctgtaacggccgatgcttctgtatactcctcattaacatctataaacgtcgtatgtagaaatttttctacagtgatagtttcattacacatcttgctaaaatctgcataatatccgaatatattagtaagtcctaaattttctaaaatcggtaccagattatacggttctgtcatttccactttaaactttggcatatacaagtctatacttttagtagataacataccacaccattttttaaatttttcatctgttatatttttttctatgttatatataccttctatgtcgtccggtagtataattaccatactagagtttccctcgtatggaatatcgataatagagaatcctccgaataattcattaatatgtacatattgcaagttattctcggtacccaccatcatatcaacgctggtaactatattcttagaaatataaaacttgtctgtatatgtaagatgtttagaaaatggatatttccacattgctttaaaatggacggcgctaacaactgtcatacgagtattaatggatagcggactagtcaataaggaattaattttaccatttgtcattgtcttaacccattcgttgattagttcctttgtttggttagcattattaaagtttacagtttgaaaatcgtcttttattttttgtaggaaggaggcgtggaactcgatactatcgctaccgtatattttatttgcggtagctagtgtcgcacaatacggaatatctacctccatgtcatcattattgtcatcgggtgtattctcattcatattctctatatattttgatagttgttcagctgtagaaccagctgctccatgatttagaatagataaagtagataaaatggaaactggagaaatcaaaacattttcatcagggtgttttaagattagttctttaaagatatccatggtatagacctaacgataacgatatatatcataaataaataatgttaaatttcaatttatgtttgtaccccgtattcatacttaacaaattggtattgcgtacacaatcaatcatattacataccattaataatgcaagcataaaaaattgttagtagatgtttctaaatataggttccgtaagcaaagaatataagaatgaagcggtaatgataaaatcaatcgttatctaaaatgatcatactcatttattttattctattatattaacacatacatttttaacagcaacacattcaatattgtattgttatttttatattatttacacaattaacaatatattattagtttatattactgaattaataatataaaattcccaatcttgtcataaacacacactgagaaacagcataaacacagaatccatcaaaaatgttgataaattatctgatgttgttgttcgctgctatgataatcagatcattcgccgatagtggtaacgctatcgaaacgacattgccagaaattacaaacgctacaacagatattccagctatcagattatgcggtccagagggagatggatattgtttacacggtgactgtatccacgctagagatattgacggtatgtattgtagatgctctcatggttatacaggcattagatgtcagcatgtagtattagtagactatcaacgttcagaaaacccaaacactacaacgtcatatatcccatctcccggtattatgcttgtattagtaggcattattatgtgttgtctattatctgtttataggttcactcgacgaactaaactacctatacaagatatggttgtgccataatttttataaatttttttatgagtatttttacaaaaatgtataaagtgtatgtcttatgtatatttataaaaatgctaagtatgcgatgtatctatgttatttgtatttatctaaacaatacctctacctctagatattatacaaaaattttttatttcggcatattaaagtaaaatctagttaccttgaaaatgaatacagtgggtggttccgtatcaccagtaagaacataatagtcaaatacagtatccgattgagattttgcatacaatactagtctagaaagaaatttgtaatcatcttctgtgacgggagtccatatatctgtatcatcgtctagtttatcagtgtcccatgctatattcctgttatcatcattagttaatgaaaataactctcgtgcttcagaaaagtcaaatattgtatccatacatacatctccaaaactatcgcttatacgtttatctttaacgatacctatacctagatggttatttactaacagacattttccagatctattgactataactcctatagtttccacatcaaccaagtaatgatcatctattgttatataacaataacataactcttttccatttttatcagtatgtatatctatatcaacgtcgtcgttgtagtgaatagtagtcattgatctattatatgaaacggatatgtctagaacggcaattgttttacgtccagttaacactttcgttgatttaaagtctagagtctttgcaaacataatatccttatccgactttatatttcctgtagggtggtataattttattttgcctccacatatcggtgtttccaaatatattactagacaatattccatatagttattagttaagggtacccaattagaacacgtacgcttattatcatcatttggatcgtatttcataaaagttattgtgttatcgatgtcaacacattctacattttttaatcgtctatatagtatttttctgatattttctataatatcagaattgtcttccatcggaagttgtatactatcggaatcagttacatgtttaaataattctctgatgtcattccttatacaatcaaattcattattaaacagtttaatagtctgtagacctttatcgtcgtaaatatccattgtcttattagttacgcttatttttatgtgtttttacgttgctttattatattttataagaatgattgtttgacgaatcacgagaactattaagacacattattaggtatatattataaaaaagtttttgattacgatgttataagaggaaagaggacacattaacatcatacatcaattaactacattcttataacatcgtaatcaaaagaattgcaattttgatgtataacaactgtcaatgggttatggaattgtatattacatattatacggtatgttggtaacgacaaataccggtcggtaattgtctgccggtgtaatagaattatatatatctatctattacaccggccttgtatacataataataagttgtggtagtatgatctccatatttataatttaggactttgtattcagtatttttggaatcataaaaaataaaaaaaagttttactaatttaaaatttaaaaagtatttacatttttttcactgtttagtcgcggatatggaattcgatcctgccaaaatcaatacatcatctatagatcatgtaacaatattacaatacatagatgaaccaaatgatataagactaacagtatgcattatccgaaatattatatcaatatcacaaaaataaatacacatttggctaatcaatttcgggcttggaaaaaacgtatcgccggaagggactatatgactaacttatctagagatacaggaatacaacaatcaaaacttactgaaactatacgtaactgtcaaaaaaatagaaacatatatggtctatatatacactacaatttagttattaattggataaccgatgtgattatcaatcaatattaagagggttggtaaattggtacatagctaataatacctatactccaaatacacccaataatacaacaaccatttctgagttggatatcatcaaaatactaaataaatacgaggacgtgtatagagtaagtaaagaaaaagaatgtggaatttgctatgaagttgtttactcaaaacgatagatactttggtttattggattcgtgtactcatatattttgcataacatgcatcaatatatggcatagaacacgaagagaaaccggtgcgtcggataattgtcctatatgccgtacccgttttagaaacataacaatgagcaagttctataagctagttaactaataaataaaaagtttaatttgttgacgacgtatgtcgttattttttctcgtataaaagattaatttgattctaatataatctttagtattggataaatatcaattcaaattaattccattagattatatcataaataaaaatagtagcacacaactacttcagcaaacattctttttataaatgccatctagcgtagcgaggacacaagtgaacctataattatcaaatttattagtatcagtcacatgaaggactttacgtagagtgacgattccactatctgtggtacgaacggtttcatcttctttgatgccatcacccagatgttctataaacttggtatcctcgtccgatttcatatcctttgccaaccaatacatatagctaaactcaggcatatgttccacacatcctgaacaatgaaattctccagaagatgttacaatgtctagatttggacatttggtttcaaccgcgttaacatatgagtgaacacacccatacatgaaagcgatgagaaataggattctcatcttgccaaaatatcactagaaaaaatttatttatcagttttaaaggtataaaaaatacttattgttgctcgaatattttgtatttgatggtatacggaagattagaaatgtaggtattatcatcaactgattctatggttttatgtattctatcatgtttcactattgcgttggaaataatatcatatgcttccacatatattttattttgttttaactcataatactcacgtaattctggattattggcatatctatgaataattttagctccatgatcagtaaatattaatgagaacatagtattaccacctaccattatttttttcatctcattcaattcttaattgcaaagatctatataatcattatagcgttgacttatggactctggaatcttagacgatgtacagtcatctataatcatggcatatttaatacattgttttatagcatagtcgttatctacgatgttagatatttctctcaatgaatcaatcacacaatctaatgtaggtttatgacataatagcattttcagcagttcaatgtttttagattcgttgatggcaatggctatacatgtatatccgttatttgatctaatgttgacatctgaaccggattctagcagtaaagatactagagattgtttattatatctaacagccttgtgaagaagtgtttctcctcgtttgtcaatcatgttaatgtctttaagataaggtaggcaaatgtttatagtactaagaattgggcaagcataagacatgtcacaaagacccttttttgtatgtataagtgtaaaaattataacatccatagttggatttacataggtgtccaatcgggatctctccatcatcgagataattgatggcatctcccttccttttttagtagatatttcatcgtgtaagaatcaatattaatatttctaaagtatccgtgtatagcctctttatttaccacagctccatattccactagagggatatcgccgaatgtcatatactcaattagtatatgttggaggacatccgagttcattgttttcaatatcaaagagatggtttccttatcatttctccatagtggtacaatactacacattattccgtgcggctttccattttccaaaaacaatttgaccaaatctaaatctacatctttattgtatctataatcactatttagataatcagccataattcctcgagtgcaacatgttagatcgtctatatatgaataagcagtgttatctattcctttcattaacaatttaacgatgtctatatctatatgagatgacttaatataatattgaagagctgtacaatagtttttatctataaaagacggcttgattccgtgattaattagacatttaacaacttccggacgcacatatgctctcgtatccgactctgaatacagatgagagatgatatacagatgcaatacggtaccgcaatttcgtagttgataatcatcatacgcgtatcagtactcgtcctcataaagaacactgcagccattttctatgaacaaatcaataattttagaaacaggatcattgtcattacataattttctataactgaacgatggttttcacatttaacactcaagtcaaatccatgttctaccaacacctttatcaagtcaacgtctacatttttggatttcatatagctgaatatattaaagttatttatgttgctaaatccagtggcttctagtagagccatcgctatatccttattaactttaacatgtctactatttgtgtattcttctaatggggtaagctgtctccaatttttgcgtaatggattagtgccactgtctagtagtagtttgacgacctcgacattattacaatgctcattaaaaaggtatgcgtgtaaagcattattcttgaattggttcctggtatcattaggatctctgtctttcaacatctgtttaagttcatcaagagccacctcctcattttccaaatagtcaaacattttgactgaatgagctactgtgaactctatacacccacacaactaatgtcattaaatatcatgtcaaaaacttgtacaattattaataaaaataatttagtgtttaaattttaccagttccagattttacacctccgttaatacctccattaaccccactggacgatcctcctccccacattccaccgccaccagatgtataagttttagatcctttattactaccatcatgtccatggataaagacactccacatgccgccactaccccctttagaagacatattaataagacttaaggacaagtttaacaataaaattaatcacgagtaccctactaccaacctacactattatatgattatagtttctatttttacagtaccttgactaaagtttctagtcacaagagcaatactaccaacctacactattatatgattatagtttctatttttataggaacgcgtacgagaaaatcaaatgtctaatttctaacggtagtgttgataaacgattgttatccgcggatacctcctctatcatgtcgtctattttcttactttgttctattaacttattagcattatatattatttgattataaaacttatattgcttattagcccaatctgtaaatatcggattattaacatatcgtttctttgtaggtttatttaacatgtacatcactgtaagcatgtccttaccatttattttaatttgacgcatatccgcaatttctttttcgcagtcggttataaattctatatatgatggatacatgctacatgtgtacttataatcgactaatatgaagtacttgatacatattttcagtaacgatttattattaccacctatgaataagtacctgtgatcgtctaggtaatcaactgttttcttaatacattcgatggttggtaatttactcagaataatttccaatatcttaatatataattctgctatttctgggatatatttatctgccagtataacacaaatagtaatacatgtaaacccatattttgttattatattaatgtctgcgccattatctattaaccattctactaggctgacactatgcgactcaatacaatgataaagtatactacatccatgtttatctattttgtttatatcatcaatatacggcttacaaagttttagtatcgataacacatccaactcacgcatagagaaggtagggaataatggcataatatttattaggttatcatcattgtcattatctacaactaagtttccattttttaaaatatactcgacaactttaggatctctattgccaaatttttgaaaatatttatttatatgcttaaatctatataatgtagctccttcatcaatcatacatttaataacattgatgtatactgtatgataagatacatattctaacaatagatcttgtatagaatctgtatatcttttaagaattgtggatattaggatattattacataaactattacacaattctaaaatataaaacgtatcacggtcgaataatagttgatcaactatataattatcgattttgtgatttttcttcctaaactgtttacgtaaatagttagatagaatattcattagttcatgaccactatagttactatcgaataacgcgtcaaatatttcccgtttaatatcgcatttgtcaagataataatagagtgtggtatgttcacgataagtataataacgcatctctttttcgtgtgaaattaaatagtttattacgtccaaagatgtagcataaccatcttgtgacctagtaataatataataatagagaactgttttacccattctatcatcataatcagtggtgtagtcgtaatcgtaatcgtctaattcatcatcccaattataatattcaccagcacgtctaatctgttctattttgatcttgtatccatactgtatgttgctacatgtaggtattcctttatccaataatagtttaaacacatctacattgggatttgatgttgtagcgtatttttctacaatattaataccatttttgatactatttatttctatacctttcgaaattagtaatttcaataagtctatattgatgttatcagaacatagatattcgaatatatcaaaatcattgatatttttatagtcgactgacgacaataacaaaatcacaacatcgtttttgatattattatttttcttggtaacgtatgcctttaatggagtttcaccatcatactcatataatggatttgcaccactttctatcaatgattgtgcactgctggcatcgatgttaaatgttttacaactatcatagagtatcttatcgttaaccatgattggttgttgatgctatcgcattttttggtttctttcatttcagttatgtatggatttagcacgtttgggaagcatgagctcatatgatttcagtactgtagtgtcagtactattagtttcaataagatcaatctctagatctatagaatcaaaacacgataggtcagaagataatgaatatctgtaggcttcttgttgtactgtaacttctggttttgttagatggttgcatcgtgctttaacgtcaatggtacaaattttatcctcgctttgtgtatcatattcgtccctactataaaattgtatattcagattatcatgcgatgtgtatacgctaacggtatcaataaacggagcacaccatttagtcataaccgtaatccaaaaatttttaaagtatatcttaacgaaagaagttgtgtcattgtctacggtgtatggtactagatcctcataagtgtatatatctagagtaatgtttaatttattaaatggttgataatatggatcctcgtgacaatttccgaagatggaaataagacataaacacgcaataaatctaattgcggacatggttactccttaaaaaaatacgaataatcaccttggctatttagtaagtgtcatttaacactatactcatattaatccatggactcataatctctatacgggattaacggatgttctatatacggggatgagtagttctcttctttaactttatactttttactaatcatatttagactgatgtatgggtaatagtgtttgaagagctcgttctcatcatcagaataaatcaatatctctgtttttttgttatacagatgtattacagcctcatatattacgtaatagaacgtgtcatctaccttattaactttcaccgcatagttgtttgcaaatacggttaatcctttgacctcgtcgatttccgaccaatctgggcgtataatgaatctaaactttaattgcttgtaatcattcgaaataatttttagtttgcatccgtagttatcccctttatgtaactgtaaatttctcaacgcgatatctccattaataatgatgtcgaattcgtgctgtatacccatactgaatggatgaacgaataccgacggcgttaatagtaatttactttttcatctttacatattgggtactagttttactatcataagtttataaattccacaagctactatggaataagccaaccatcttagtataccacacatgtcttaaagtttattaattaattacatgttgttttatatatatcgctacgaatttaaagagaaattagtttaggaagaaaaattatctatctacatcatcacgtctctgtattctacgatagagtgctactttaagatgcgacagatccgtgtcatcaaatatatactccattaaaatgattattccggcagcgaacttgatattggatatatcacaacctttgttaatatctacgacaatagacagcagtcccatggttccataaacagtgagtttatctttctttgaagagatattttgtagagatcttataaaactgtcgaatgacatcgcatttatatctttagctaaatcgtatatgttaccatcgtaatatctaaccgcgtctatcttaaacgtttccatcgctttaaagacgtttccgatagatggtctcatttcatcagtcatactgagccaacaaatataatcgtgtataacatctttgatagaatcagactctaaagaaaacgaatcggctttattatacgcattcatgataaacttaatgaaaaatgtttttcgttgtttaagttggatgaatagtatgtcttaataattgttattatttcattaattaatatttagtaacgagtacactctataaaaacgagaatgacataactaatcataactagttatcaaagtgtctaggacgcgtaattttcatatggtatagatcctgtaagcattgtctgtattctggagctattttctctatcgcattagtgagttcagaatatgttataaatttaaatcgaataacgaacataactttagtaaagtcgtctatattaactcttttattttctagccatcgtaataccatgtttaagatagtatattctctagttactacgatctcatcgttgtctagaatatcacatactgaatctacatccaattttagaaattggtctgtgttacatatctcttctatattattgttgatgtattgtcgtagaaaactattacgtagaccattttctttataaaacgaatatatagtactccaattatctttaccgatatatttgcacacataatccattctctcaatcactacatctttaagattttcgttgttaagatatttggctaaactatataattctattagatcatcaacagaatcagtatatatttttctagatccaaagacgaactctttggcgtcctctataatattcccagaaaagatattttcgtgttttagtttatcgagatctgatctgttcatatacgccatgattgtacggtacgttatgataaccgcataaaataaaaatccattttcatttttaaccaatactattcataattgagattgatgtaatactttgttactttgaacgtaaagacagtacacggatccgtatctccaacaagcacgtagtaatcaaatttggtgttgttaaacttcgcaatattcatcaatttagatagaaacttatactcatcatctgttttaggaatccatgtattattaccactttccaacttatcattatcccaggctatgtttcgtccatcatcgttgcgcagagtgaataattcttttgtattcggtagttcaaatatatgatccatgcatagatcggcaaagctattgtagatgtgatttttcctaaatctaatataaaactcgtttactagcaaacactttcctgatttatcgaccaagacacatatggtttctaaatctatcaagtggtggggatccatagttatgacgcagtaacatatattattacattcttgactgtcgctaatatctaaatatttattgttatcgtattggattctgcatatagatggcttgtatgtcaaagatatagaacacataaccaatttatagtcgcgctttacattctcgaatctaaagttaagagatttagaaaacattatatcctcggatgatgttatcactgtttctggagtaggatatattaaagtctttacagatttcgtccgattcaaataaatcactaaataatatcccacattatcatctgttagagtagtatcattaaatctattatattttatgaaagatatatcactgctcacctctatatttcgtacatttttaaactgtttgtataatatctctctgatacaatcagatatatctattgtgtcggtagacgataccgttacatttgaattaatggtgttccattttacaacttttaacaagttgaccaattcatttctaatagtatcaaactctccatgattaaatattttaatagtatccattttatatcactacggacacaaagtagctgacataaaccattgtataatttttatgttttatgtttattagcgtacacattttggaagttccggcttccatgtatttcctggagagcaagtagatgatgaggaaccagatagtttatatccgtacttgcacttaaagtctacattgtcgttgtatgagtatgatcttttaaacccgctagacaagtatccgtttgatattgtaggatgtggacatttaacaatctgacacgtgggtggatcggaccattctcctcctgaacacaggacactagagttaccaatcaacgaatatccactattgcaactataagttacaacgctcccatcggtataaaaatcctcgtatccgttatgtcttccgttggatatagatggaggggattggcatttaacagattcacaaataggtgcctcgggattccataccatagatccagtagatcctaattcacaatacgatttagattcaccgatcaactgatatccgctattacaagagtacgttatactagagccaaagtctactccaccaatatcaagttggccattatcgatatctcgaggcgatgggcatctccgtttaatacattgattaaagagtgtccatccagtacctgtacatttagcatatataggtcccattttttgctttctgtatccaggtagacatagatattctatagtgtctcctatgttgtaattagcattagcatcagtctccacactattcttaaatttcatattaatgggtcgtgacggaatagtacagcatgatagaacgcatcctattcccaacaatgtcaggaacgtcacgctctccaccttcatatttatttatccgtaaaaatgttatcctggacatcgtacaaataataaaaagcccatatatgttcgctattgtagaaattgtttttcacagttgctcaaaaacgatggcagtgacttatgagttacgttacactttggagtctcatctttagtaaacatatcataatattcgatattacgagttgacatatcgaacaaattccaagtatttgattttggataatattcgtattttgcatctgctataattaagatataatcaccgcaagaacacacgaacatctttcctacatggttaaagtacatgtacaattctatccatttgtcttccttaactatatatttgtatagataattacgagtctcgtgagtaattccagtaattacatagatgtcgccgtcgtactctacagcataaactatactatgatgtctaggcatgggagacttttttatccaacgatttttagtgaaacattccacatcgtttaatactacatatttctcatacgtggtataaactccacccattacatatatatcatcgtttacgaataccgacgcgcctgaatatctaggagtaattaagtttggaagtcttatccatttcgaagtgccgtgtttcaaatattctgccacacccgttgaaatagaaaattctaatcctcctattacatataactttccatcgttaacacaagtactaacttctgattttaacgacgacatattagtaaccgttttccattttttcgttttaagatctacccgcgatacggaataaacatgtctattgttaatcatgccgccaataatgtatagacaattatgtaaaacatttgcattatagaattgtctatctgtattaccgactatcgtccaatattctgttctaggagagtaatgggttattgtggatatataatcagagtttttaatgactactatattatgttttataccatttcgtgtcactggctttgtagatttggatatagttaatcccaacaatgatatagcattgcgcatagtattagtcataaacttgggatgtaaaatgttgatgatatctacatcgtttggatttttatgtatccactttaataatatcatagctgtaacatcctcatgatttacgttaacgtcttcgtgggataagatagttgtcagttcatcctttgataattttccaaattctggatcggatgtcaccgcagtaatattgttgattatttctgacatcgacgcattatatagttttttaattccatatcttttagaaaagttaaacatccttatacaatttgtgaaattaatattatgaatcatagtttttacacatagatctactacaggcggaacatcaattattatggcagcaactagtatcatttctacattgtttatggtgatgtttatcttcttccagcgcatatagtctaatagcgattcaaacgcgtgatagtttataccattcaatataatcgcttcatcctttagatggtgatcctgaatgcgtttaaaaaaattatacggagacgccgtaataatttccttattcacttgtataatttccccattgatagaaaatattacgctttccattcttaaagtactataagtaattatagtataatgtaaacgtttatatattcaatatttttataaaaatcattttgacattaattcctttttaaatttccgtctatcatctatagaaacgtattctatgaatttataaaatgcttttacgtgtcctatcgtaggcgatagaaccgctaaaaagcctatcgaatttctacaaaagaatctgttatatggtatagggagagtataaaacattaaatgtccgtacttattaaagtattcagtagccaatcctaactctttcgaatacttattaatggctcttgttctgtacgaatctatttttttgaacaacggacctagtggtatatcttgttctatgtatctaaaataatgtctgactagatccgttagtttaatatccgcagtcatcttgtctagaatggcaaatctaactgcgggtttaggctttagtttagtttctatatctacatctatgtctttatctaacaccaaaaatataatagctaatattttattacaatcatccggatattcttctacgatctcactaactaatgtttctttggttatactagtatagtcactatcggacaaataaagaaaatcagatgatcgatgaataatacatttaaattcatcatctgtaagatttttgagatgtctcattagaatattattagggttagtactcattatcattcggcagctattacttattttattatttttcaccatatagatcaatcattagatcatcaaaatatgtttcaatcatcctaaagagtatggtgaatgactcttcccatctaatttctgaacgttcaccaatgtctctagccactttggcactaatagcgatcattcgcttagcgtcttctatattattaactggttgatttaatctatctagcaatggaccgtcggacagcgtcattctcatgttcttaatcaatgtacatacatcgccgtcatctaccaattcatccaacaacataagctttttaaaatcatcattataataggtttgatcgttgtcatttctccaaagaatatatctaataagtagagtcctcatgcttagttaacaactattttttatgttaaatcaattagtacaccgctatgtttaatacttattcatattttagtttttaggattgagaatcaatacaaaaattaatgcatcattaattttagaaatacttagtttccacgtagtcaatgaaacatttgaactcatcgtacaggacgttctcgtacaggacgtaactataaaccggtttatatttgttcaagatagatacaaatccgataactttttttacgaattctacgggatccactttaaaagtgtcataccgggttctttttatttttttaaacagatcaatggtgtgatgttgattaggtcttttacgaatttgatatagaatagcgtttacatattctccataatggtcaatcgccatttgttcgtatgtcataaattctttaattatatgacactgtgtattatttagttcatccttgttcattgttaggaatctatccaaaatggcaattatactagaactataggtgcgttgtatacacatattgatgtgtctgtttatacaatccatgatatttggatccatgctactaccttcgggtaaaattgtagcatcatataccatttctagtactttaggttcattattatccattgcagaggacgtcatgatcgaatcataaaaaaatatattatttttatgttattttgttaaaaataatcatcgaatacttcgtaagatactccttcatgaacataatcagttacaaaacgtttatatgaagtaaagtatctacgatttttacaaaagtccggatgcataagtacaaagtacgcgataaacggaataataatagatttatctagtctatctttttctatagctttcatagttagatacatggtctcagaagtaggattatgtaacatcagcttcgataaaatgactgggttatttagtcttacacattcgctcatacatgtatgaccgttaactacagagtctacactaaaatgattgaacaatagatagtctaccattgtttcgtattcagatagtacagcgtagtacatggcatcttcacaaattatatcattgtctaatagatatttgacgcatcttatggatcccacttcaacagccatcttaaaatcatattgctttcctttatcattaataatttctagaacatcatctctatcataaaagatacaaatattaactgtttgatccgtaataacattgctagtcaatagcaatttgttaataagatgcgctgggctcaatgtcttaataagaagtgtaagaggactatctccgaatttgttttgtttattaacatccgttgatggaagtaaaagatctataatgtctacattcttgactgttttagagcatacaatatggagaggtgtatttccatcatgatctggttttgagggactaattcctagtttcatcatccatgagattgtagaagcttttggattgtctgacataagatgtctatgaatatgatttttgccaaatttatccactatcctggcttcgaatccgatggacattatttttttaaacactctttctgaaggatctgtacacgccaacaacggaccacatccttcttcatcaaccgagttgttaatcttggctccatactgtaccaataaatttattctctctatgacttcatcatctgttcccgagagataatatagaggtgttttatgctgtttatcacacgcgtttggatctgcgccgtgcgtcagcagcatcgcgactattctattattattaattttagaagctatatgcaatggataatttccatcatcatccgtctcatttggagagtatcctctatgaagaagttcttcgacaaatcgttcatctagtcctttaattccacaatacgcatgtagaatgtgataattatttccagaaggttcgatagcttgtagcatattcctaaatacatctaaatttttactattatatttggcataaagagatagataatactcggccgacataatgttgtccattgtagtataaaaattaatatttctatttctatttctgtatatttgcaacaatttactctctataacaaatatcataacttagtttttttatgtcaagaaggcactggtttagttcatctataaatgtcacgccataactaccacgcatgccatactcagaattatgataaagatatttatccttggggtgtaggtaatggggattaatctttgttggatcagtctctaagttaacacatgtcacacatgatccatttatagttatatcacacgatgatgatttatgaattgattccggaagatcgctatcgtattttgtggttccacaattcatttccatacatgttattgtcacactaatattatgatgaactttatctagccgctgagtggtaaacaacagaacagatagtttattatctttaccaacaccctcagccgctgccacaaatctctgatccgtatccatgatggtcatgtttatttctagtccgtatccagtcaacactatgttagcatttctgtcgatatagctttcactcatatgacactcaccaataatagtagaattaatgtcgtaatttacaccaatagtgagttcggcggcaaagtaccaataccggtaatcttgtcgaggaggacatatagtattcttgtattctaccgaatacccgagagatgcgatacaaaagagcaagactaatttgtaaaccatcttactcaaaatatgtaacaatagtacgatgcaatgagtaagacaataggaaatctatcttatatacacataattattctatcaattttaccaattagttagtgtaatgttaacaaaaatgtgggagaatctaattagtttttctttacacaattgacgtacatgagtctgagttccttgtttttgctaattatttcatccaatttattattcttgacgatatcgagatcttttgtataggagtcaaacttgtattcaacatgcttttctataatcattttagctatttcggcatcatccaatagtacattttccagattagcagaatagatattaatgtcgtatttgaacagagcctgtaacatctcaatgtctttattatctatagccaatttaatgtccggaatgaagagaagggaattattggtgtttgtcgacgtcatatagtcgagcaagagaatcatcatatccacgtgtccattttttatagtgatgtgaatacaactaaggagaatagccagatcaaaagtagatggtatctctgaaagaaagtaggaaacaatacttacatcattaagcatgacggcatgataaaatgaagttttccatccagttttcccatagaacatcagtctccaatttttcttaacaaacagttttaccgtttgcatgttaccactatcaaccgcataatacaatgcggtgtttcccttgtcatcaaattgtgaatcatccagtccactgaatagcaaaatctttactattttggtatcttccaatgtggctgcctgatgtaatggaaattcattctctagaagatttttcaatgctccagcgttcaacaacgtacatactagacgcacgttattatcagctattgcataatacaaggcactatgtccatggacatccgccttaaatgtatctttactagagagaaagcttttcagctgcttagacttccaagtattaattcgtgacagatccatgtctgaaacgagacgctaattagtgtatattttttcattttttataattttgtcatattgcaccagaattaataatatctttaatagatctgattagtagatacatggctatcgcaaaacaacatatacacatttaataaaaataatatttattaagaaaattcagatttcacgtacccatcaatataaataaaataatgattccttacaccgtacccatattaaggagattccaccttacccataaacaatataaatccagtaatatcatgtctgatgatgaacacaaatggtgtattaaattccagtttttcaggagatgatctcgccgtagctaccataatagtagatgcctctgctacagttccttgttcgtcgacatctatctttgcattctgaaacattttataaatatataatgggtccctagtcatatgtttaaacgacgcattatctggattaaacatactaggagccatcatttcggctatcgacttaatatccctcttattttcgatagaaaatttagggagtttaagattgtacactttattccctaattgagacgaccaatagtctaattttgcagccgtgatagaatctgtgaaatgggtcatattatcacctattgccaggtacatactaatattagcatccttatacggaaggcgtaccatgtcatattctttgtcatcgattgtgattgtatttccttgcaatttagtaactacgttcatcatgggaaccgttttcgtaccgtacttattagtaaaactagcattgcgtgttttagtgatatcaaacggatattgccatatacctttaaaatatatagtattaatgattgcccatagagtattattgtcgagcatattagaatctactacattagacataccggatctacgttctactatagaattaattttattaaccgcatctcgtctaaagtttaatctatataggccgaatctatgatattgttgataatacgacggtttaatgcacacagtattatctacgaaactttgataagttagatcagtgtacgtatatttagatgttttcagcttagctaatcctgatattaattctgtaaatgctggacccagatctctttttctcaaatccatagtcttcaataattctattctagtattacctgatgcaggcaatagcgacataaacatagaaaacgaataaccaaacggtgagaagacaatattatcatcttgaatatttttatacgctactataccggcattggtaaatccttgtagacgataggcggacgctgaacacgctaacgatagtatcaataacgcaatcatgattttatggtattaataattaaccttatttttatgttcggtataaaaaaattattgatgtctacacatccttttgtaattgacatctatatatccttttgtataatcaactctaatcactttaacttttacagttttccctaccagtttatccctatattcaacatatctatccatatgcatcttaacactctctgccaagatagcttcagagtgaggatagtcaaaaagataaatatatagagcataatcattctcgtatactctgccctttattacatcacccgcattgggcaacgaataacaaaatgcaagcatcttgttaacgggctcgtaaattgggataaaaattatgtttttattgtcttatatctattttattcaagagaatattcaggaatttctttttccggttgtatctcgtcgcagtatatatcatttgtacattgtttcatattttttaatagtttacaccttttagtaggactagtatcgtacaattcatagctgtattttgaattccaatcacgcataaaaatatcttccaattgttgacgaagacctaatccatcatccggtgtaatattaatagatgctccacatgtatccgtaaagtaatttcctgtccaatttgaggtacctatataggccgttttatcggttaccatatatttggcatggtttaccctagaatacggaatgggaggatcagcatctggtacaataaatagctttacttctatatttatgtttttagattttagcatagcgatagatcttaaaaagtttctcatgataaacgaagatcgttgccagcaactaatcaatagcttaacggatacttgtctgtctatagcggatcttcttaattcatcttctatataaggccaaaacaaaattttacccgccttcgaataaataatagggataaagttcataacagatacataaacgaatttactcgcatttctaatacatgacaataaagcggttaaatcattggttctttccatagtacatagttgttgcggtgcagaagcaataaatacagagtgtggaacgccgcttacgttaatactaagaggatgatctgtattataatacgacggataaaagtttttccaattatatggtagattgttaactccaagataccagtatacctcaaaaatttgagtgagatccgctgccaagttcctattattgaagatcgcaatacccaattccttgacctgagttagtgatctccaatccatgttagcgcttcctaaataaatatgtgtattatcagatatccaaaattttgtatgaagaactcctcctaggatatttgtaatatctatgtatcgtacttcaactccggccatttgtagtctttcaacatcctttaatggtttgttagatttattaacggctactctaactcgtactcctcttttgggtaattgtacaatctcgtttaatattatcgtgccgaaattcgtacccacttcatccgataaactccaataaaaagatgatatatctagtgtttttgtggtattggatagaatttccctccacatgttaaatgtagacaaatatactttatcaaattgcatacctataggaatagtttctgtaatcactgcgattgtattatccggattcattttatttgttaaaagaataatcctatatcacttcactctattaaaaatccaagtttctatttctttcatgactgattttttaacttcatccgtttccttatgaagatgatgtttggcaccttcataaatttttatttctctattacaatttgcatgttgcatgaaataatatgcacctaaaacatcgctaatcttattgtttgttccctggagtatgagagtcggggggtgttaatcttggaaattatttttctaaccttgttggtagccttcaagacctgactagcaaatccagccttaattttttcatgattgactaatgggtcgtattggtatttataaactttatccatatctctagatactgattctggacatagctttccgactggcgcatttggtgtgatggttcccataagtttggcagctagcagattcagtcttgaaacagcatctgcattaactagaggagacattagaatcattgctgtaaacaagtttggattatcgtaagaggctagctcccatggaatgacccaataagtagatttaatagttaccacgtgctgtaccaaagtcatcaatcatcattttttcaccattacttcttccatgtccaatatgatcatgtgagaatactaaaattcctaacgatgatatgttttcagctagttcgtcataacgtccagaatgtttaccagctccatgacttatgaatactaatgccttaggatatgtaataggtttccaatatttacaatatatgtaatcattgtccagattgaacatacagtttgcactcatgattcacgttatataactatcaatattaacagttcgtttgatgatcatattatttttatgttttattgataattgtaaaaacatacaattaaatcaatatagaggaaggagacggctactgtcttttgtaagatagtcatggcgactaaattagattatgaggatgctgttttttactttgtggatgatgataaaatatgtagtcgcgactccatcatcgatctaatagatgaatatattacgtggagaaatcatgttatagtgtttaacaaagatattaccagttgtggaagactgtacaaggaattgatgaagttcgatgatgtcgctatacggtactatggtattgataaaattaatgagattgtcgaagctatgagcgaaggagaccactacatcaattttacaaaagtccatgatcaggaaagtttattcgctaccataggaatatgtgctaaaatcactgaacattggggatacaaaaagatttcagaatctagattccaatcattgggaaacattacagatttgatgaccgacgataatataaacatcttgatactttttctagaaaaaaaattgaattgatgatataggggtcttcataacgcataattattacgttagcattctatatccgtgttaaaaaaaattatcctatcatgtatttgagagttttatatgtagcaaacatgatagctgtgatgccaataagctttagatattcacgcgtgctagtgttagggatggtattatctggtggtgaaatgtccgttatataatctacaaaacaatcatcgcatatagtatgcgatagtagagtaaacatttttatagtttttactggattcatacatcgtctacccaattcggttataaatgaaattgtcgccaatcttacacccaaccccttgttatccattagcatagtattaacttcgttatttatgtcataaactgtaaatgattttgtagatgccatatcatacatgatattcatgtccctattataatcattactaactttatcacaatatatgttgataatatctatatatgatctagtctttgtgggcaactgtctatacaagtcgtctaaacgttgtttactcatatagtatcgaacagccatcattacatggtcccgttccgttgatagataatcgagtatgttagtggacttgtcaaatctatataccatattttctggaagtggatatacatagtcgtgatcaacattattgctagcctcatcttctatatcctgtactataccattatctatatcatctacataatctatgatattattacacataaacatcgacaacatactattgtttattatctaagtcctgttgatccaaacccttgatctcctctatttgtactatctagagattgtacttcttccagttctggataatatatacgttgatagattagctgagctattctatctccagtatttacattaaacgtacattttccattattaataagaatgactcctatgtttcccctataatcttcgtctattacaccacctcctatatcaatgccttttagtgacagaccagacctaggagctattctaccatagcagaacttaggcatggacatactaatatctgtcttaattaactgtctttctcctggagggatagtataatcgtaagcgctatacaaatcatatccggcagcacccggcgattgcctagtaggagatttagctctgttagtttccttaacaaatctaactggtgagttaatattcatgttgaacataaaactaatattttatttcaaaattatttaccatcccatatattccatgaataagtgtgatgattgtacacttctatagtatctatatacgatccacgataaaatcctcctatcaatagcagtttattatccactatgatcaattctggattatccctcggataaataggatcatctatcagagtccatgtattgctggattcacaataaaattccgcatttctaccaaccaagaataaccttctaccgaacactaacgcgcatgatttataatgaggataataagtggatggtccaaactgccactgatcatgattgggtagcaaatattctgtagttgtatcagtttcagaatgtcctcccattacgtatataacattgtttatggatgccactgctggattacatctaggtttcagaagactcggcatattaacccaagcagcatccccgtggaaccaacgctcaacagatgtgggatttggtagacctcctactacgtataatttattgttagcgggtatcccgctagcatacagtctggggctattcatcggaggaattggaatccaattgtttgatatataatttacagctatagcattgttatgtatttcattgttcatccatccaccgatgagatatactacttctccaacatgagtacttgtacacatatggaatatatctataatttgatccatgttcataggatactctatgaatggatacttgtatgatttgcgtggttgtttatcacaatgaaatattttggtacagtctagtatccattttacattatttatacctctgggagaaagataatttgacctgattacatttttgataaggagtagcagatttcctaatttatttcttcgcctcatataccacttaatgacaaaatcaactacataatcctcatctggaacatttagttcatcgctttctagaataagtttcatagatagataatcaaaattgtctatgatgtcatcttccagttccaaaaagtgtttggcaataaagtttttagtatgacataagagattggatagtccgtattctatacccatcatgtaacactcgacacaatattcctttctaaaatctcgtaagataaagtttatacaagtgtagatgataaattctacagaggttaatatagaagcacgtaataaattgacgacgttatgactatctatatatacctttccagtatatgagtaaataactatagaagttaaactgtgaatgtcaaggtctagacaaacccttgtaactggatctttatttttcgtgtatttttgacgtaaatgtgtgcgaaagtaaggagataactttttcaatatcgtagaattgactattatattgcctcctatggcatcaataattgttttgaatttcttagtcatagacaatgctaatatattcttacagtacacagtattgacaaatatcggcatttatgtttctttaaaagtcaacatctagagaaaaatgattatctttttgagacataactcccattttttggtattcacccacacgtttttcgaaaaaattagtttttccttccaatgatatattttccatgaaatcaaacggattggtaacattataaatttttttaaatcccaattcagaaatcaatctatccgcgacgaattctatatatgttttcatcatttcacaattcattcctataagtttaactggaagagccgcagtaagaaattcttgttcaatggatactgcatctgttataatagatctaacggtttcttcactcggtggatgcaataaatgtttaaacatcaaacatgcgaaatcgcagtgcagaccctcgtctctactaattagttcgttggaaaacgtgagtccgggcattaggccacgctttttaagccaaaatatggaagcgaatgatccagaaaagaaaattccttctactgcagcaaaggcaataagtctctctccataaccggcgctgtcatgtatccacttttgagcccaatcggccttcttttttacacaaggcatcgtttctatggcattaaagagatagtttttttcattactatctttaacataagtatcgatcaaaagactatacatttccgaatgaatgttttcaatggccatctgaaatccgtagaaacatctagcctcggtaatctgtacttctgtacaaaatcgttccgccaaattttcattcactattccgtcactggctgcaaaaaacgccaatacatgttttataaaatatttttcgtctggtgttagtttattccaatcattgatatctttagatatatctacttcttccactgtccaaaatgatgcctctgcctttttatacatgttccagatgtcatgatattggattgggaaaataacaaatctatttggatttggtgcaaggatgggttccataactaaattaacaataacaataaattttttttcagttatctatatgcctgtacttggattttttgtacatcgatatcgccgcaatcactacaataattacaagtattattgatagcattgttattagtactatcataattaaattatctacattcatgggtgctgaataatcgttattatcatcattatcattttgtaattgtgacatcatactagataaatcgtttgcgagattgttgtgggaagcgggcatggaggatgcattatcattattatttaacgccttccatttggattcacaaatgttacgcacattcaacattttatggaaactataattttgtgaaaacaaataacaagaaaactcgtcatcgttcaaatttttaacgatagtaaaccgattaaacgtcgagctaatttctaacgctagcgactctgttggatatgggtttccagatatatatcttttcagttcccctacgtatctataatcatctgtaggaaatggaagatatttccatttatctactgttcctaatatcatatgtggtggtgtagtagaaccattaagcgcgaaagatgttatttcgcatcgtattttaacttcgcaataatttctggttagataacgcactctaccagtcaagtcaatgatattagcctttacagatatattcatagtagtcgtaacgatgactccatcttttagatgcgatactcctttgtatgtaccagaatcttcgtacctcaaactcgatatatttaaacaagttaatgagatattaacgcgttttatgaatgatgatatataaccagaagttttatcctcggtggctagcgctataaccttatcattataataccaactagtgtgattaatatgtgacacgtcagtgtgggtacaaatatgtacattatcgtctacgtcgtattcgatacatccgcatacagccaacaaatataaaatgacaaatactctaacgccgttcgtacccatcttgatgcggtttaataaatgttttgatttcaatttattgtaaaaaaagattcggttttatactgttcgatattctcattgcttatattttcatctatcatctccacacagtcaaatccgtggttagcatgcacctcatcaaccggtaaaagactatcggactcttctatcattataactctagaatatttaatttggtcattattaatcaagtcaattatcttatttttaacaaacgtgagtattttactcattttttataaaaacttttagaaatatacagactctatcgtgtgtctatatcttctttttatatccaatgtatttatgtctgatttttcttcatttatcatatataatggtccaaattctacacgtgcttcggattcatccagatcattaaggttcttataattgtaacatccttctcttccctcttctacatcttccttcttattcttattcttagcgtcacagaatctaccacagcaggatcccatgacgagcgtcatattaaactaatccattttcaattataatatatgattagtaatgaccattaaaataaaaaatattcttcataaccggcaagaaagtgaaaagttcacattgaaactatgtcagtagtatacatcatgaaatgatgatatatatatactctattttggtggaggattatatgatataattcgtggataatcatttttaagacacatttctttattcgtaaatcttttcacgttaaatgagtgtccatattttgcaatttcttcatatgatggcggtgtacgtggacgaggctgctcctgttcttgttgtggtcgccgactgtcgtgtctgcgtttagatccctccattatcgcgattgcgtagatggagtactattttataccttgtaattaaatttttttattaattaaacgtataaaaacgttccgtatctgtatttaagagccagatttcgtctaatagaacaaatagctacagtaaaaataactagaataattgctacacccactagaaaccacggatcgtaatacggcaatcggttttcgataataggtggaacgtatattttatttaaggacttaacaattgtctgtaaaccacaatttgcttccgcggatcctgtattaactatctgtaaaagcatatgttgaccgggcggagccgaacattctccgatatctaatttctgtatatctataatattattaacctccgcatacgcattacagttcttttctagcttggataccgcactaggtacatcgtctagatctattcctatttcctcagcgatagctcttctatccttttccggaagcaatgaaatcacttcaataaatgattcaaccatgagtgtgaaactaagtcgagaattactcatgcatttgttagttattcggagcgcgcaatttttaaactgtcctataacctctcctatatgaatagcacaagtgacattagtagggatagaatgttgagctaatttttgtaaataactatctataaaaagattatacaaagttttaaactctttagtttccgccatttatccagtctgagaaaatgtctctcataataaatttttccaagaaactaattgggtgaagaatggaaacctttaatctatatttatcacagtctgttttggtacacatgatgaattcttccaatgccgtactaaattcgatatctttttcgatttctggatatgtttttaataaagtatgaacaaagaaatggaaatcgtaataccagttatgtttaactttgaaattgttttttattttcttgttaatgattccagccacttgggaaaagtcaaagtcgtttaatgccgatttaatacgttcattaaaaacaaactttttatcctttagatgaattattattggttcattggaatcaaaaagtaagatattatcgggtttaagatctgcgtgtaaaaagttgtcgcaacagggtagttcgtagattttaatgtataacagagccatctgtaaaaagataaactttatgtattgtaccaaagatttaaatcctaatttgatagctaactcggtatctactttatctgccgaatacagtgctaggggaaaaattataatgtttcctctttcatattcgtagttagttctcttttcatgttcgaaaaagtgaaacatgcggttaaaatagtttataacattaatattactgttaataactgccggataaaagtgggatagtaatttcacgaatttgatactgtcctttctctcgttaaacgcctttaaaaaaactttagaagaatatctcaatgagagttcctgaccatccatagtttgtatcaataatagcaacatatgaagaacacgtttatacagagtatgtaaaaatgttaatttatagtttaatcccatggcccacgcacacacgattaattttttttcatctccctttagattgttgtatagaaatttgggtactgtgaactccgccgtagtttccatgggactatataattttgtggcctcgaatacaaattttactacatagttatctatcttaaagactataccatatcctcctgtagatatgtgataaaaatcgtcgtttataggataaaatcgtttatccttttgttggaaaaaggatgaattaatgtaatcattctcttctatctttagtagtgtttccttattaaaattcttaaaataatttaacaatctaactgacggagcccaattttggtgtaaatctaattgggacattatattgttaaaatacaaacagtctcctaatataacagtatctgataatctatggggagacatccattgatattcaggggatgaatcattggcaacacccatttattgtacaaaaagccccaatttacaaacgaaagtccaggtttgatagagacaaacaattaactattttgtctctgtttttaacacctccacagtttttaatttctttagtaatgaaattattcacaatatcagtatcttctttatctaccagagattttactaacttgataaccttggctgtctcattcaatagggtagtaatatttgtatgtgtgatattgatatctttttgaattgtttcttttagaagtgattctttgatggtgccagcatacgaattacaataatgcagaaactcggttaacatgcaggaattatagtaagccaattccaattgttgcctgtgttgtattagagtgtcaatatgagcaatggtgtccttgcgtttctctgatagaatgcgagcagcgattttggcgttatcatttgacgatatttctggaatgacgaatcctgtttctactaactttttggtaggacaaagtgaaacaatcaagaagatagcttctcctcctatttgtggaagaaattgaactcctctagatgatctactgacgatagtatctccttgacagatattggaccgaattacagaagtacctggaatgtaaagccctgaaaccccctcattttttaagcagattgttgccgtaaatcctgcactatgcccaagatagagagctcctttggtgaatccatctctatgtttcagtttaaccaagaaacagtcagctggtctaaaatttccatctctatctaatacagcatctaacttgatgtcaggaactatgaccggtttaatgttatatgtaacattgagtaaatccttaagttcataatcatcactgtcatcagttatgtacgatccaaacaatgtttctaccggcatagtggatacgaagatgctatccatcagaatgtttccctgattagtattttctatatagctattcttctttaaacgattttccaaatcagtaactatgttcatttttttaggagtaggacgcctagccagtatggaagaggattttctagatcctctcttcaacatctttgatctcgatggaatgcaaaaccccatagtgaaacaaccaacgataaaaataatattgtttttcactttttataattttaccatctgactcatggattcattaatatctttataagagctactaacgtataattctttataactgaactgagatatatacaccggatctatggtttccataattgagtaaatgaatgctcggcaataactaatggcaaatgtatagaacaacgaaattatactagagttgttaaagttaatattttctatgagctgttccaataaattatttgttgtgactgcgttcaagtcataaatcatcttgatactatccagtaaaccgtttttaagttctggaatattatcatcccattgtaaagcccctaattcgactatcgaatatcctgctctgatagcagtttcaatatcgacggacgtcaatactgtaataaaggtggtagtattgtcatcatcgtgataaactacgggaatatggtcgttagtaggtacggtaactttacacaacgcgatatataactttccttttgtaccatttttaacgtagttgggacgtcctgcagggtattgttttgaagaaatgatatcgagaacagatttgatacgatatttgttggattcctgattattcactataatataatctagacagatagatgattcgataaatagagaaggtatatcgttggtaggataatacatccccattccagtattctcggatactctattgatgacactagttaagaacatgtcttctattctagaaaacgaaaacatcctacatggactcattaaaacttctaacgctcctgattgtgtctcgaatgcctcgtacaaggatttcaaggatgccatagattctttgaccaacgatttagaattgcgtttagcatctgatttttttattaaatcgaatggtcggctctctggtttgctaccccaatgataacaatagtcttgtaaagataaaccgcaagaaaatttatacgcatccatccaaataaccctagcaccatcggatgatattaatgtattattatagattttccatccacaattattgggccagtatactgttagcaacggtatatcgaatagattactcatgtaacctactagaatgatagttcgtgtactagtcataatatctttaatccaatctaaaaaatttaaaattagattttttacactgttaaagttaacaaaagtattacccgggtacgtggatatcatatatggcattggtccattatcagtaatagctccataaactgatacggcgatggtttttatatgtgtttgatctaacgaggaagaaattcgcgcccacaattcatctctagatatgtatttaatatcaaacggtaacacatcaatttcgggacgcgtatatgtttctaaatttttaatccaaatataatgatgacctatatgccctattatcatactgtcaactatagtacacctagggaacttacgatacatctgtttcctataatcgttaaattttacaaatctataacatgctaaaccttttgacgacagccattcattaatttctgatatggaatctgtattctcgataccgtatcgttctaaagccagtgctatatctccctgttcgtgggaacgctttcgtataatatcgatcaacggataatctgaagtttttggagaataatatgactcatgatctatttcgtccataaacaatctagacataggaattggaggcgatgatcttaattttgtgcaatgagtcgtcaatcctataacttctaatcttgtaatattcatcatcgacataatactatctatgttatcatcgtatattagtataccatgaccttcttcatttcgtgccaaaatgatatacagtcttaaatagttacgcaatatctcaatagtttcataattgttagctgttttcatcaaggtttgtatcctgtttaacatgatggcgttctataacgtctctattttctatttttaattttttaaatttttaacgatttactgtggctagatacccaatctctctcaaatatttttttagcctcgcttacaagctgtttatctatactattaaaactgacgaatccgtgattttggtaatgggttccgtcgaaatttgccgaagtgatatgaacatattcgtcgtcgactatcaacaattttgtattattctgaatagtgaaaaccttcacagatagatcattttgaacacacaacgcatctagacttttggcggttgccatagaatatacgtcgttcttatcccaattaccaactagaagtctgatcttaactcctctattaatggctgcttctataatggagttgtaaatgtcgggccaatagtagctattaccgtcgacacgtgtagtgggaactatggccaaatgttcaatatctatactagtcttagctgacctgagtttatcaataactacatcggtatctagatctctagaatatcccaataggtgttccggagaatcagtaaagaacactccacctataggattcttaatatgatacgcagtgctaactggcaaacaacaagccgcagagcataaattcaaccatgaattttttgcgctattaaaggctttaaaagtatcaaatcttctacgaagatctgtggccagcgggggataatcagaatatacacctaacgttttaatcgtatgtatagatcctccagtaaatgacgcgtttcctacataacatctttcatcatctgacacccaaaaacaaccgagtagtagtcccacattattttttttatctatattaacggttataaaatttatatccgggcagtgactttgtagctctcccagatttcttttccctcgttcatctagcaaaactattattttaatccctttttcagatgcctcttttagtttatcaaaaataagcgctcccctagtcgtactcagaggattacaacaaaaagatgctatgtatatatatttcttagctagagtgataatttcgttaaaacattcaaatgttgttaaatgatcggatctaaaatccatattttctggtagtgtttctaccagcctacattttgctcccgcaggtaccgatgcaaatggccacatttagttaacataaaaacttatacatcctgttctatcaacgattctagaatatcatcggctatatcgctaaaattttcatcaaagtcgacatcacaacctaactcagtcaatatattaagaagttccatgatgtcatcttcgtctatttctatatccgtatccattgtagattgttgaccgattatcgagtttaaatcattactaatactcaatccttcagaatacaatctgtgtttcattgtaaatttataggcggtgtatttaagttggtagattttcaattatgtattaatatagcaacagtagttcttgctcctccttgattctagcatcctcttcattattttcttctacgtacataaacatgtccaatacgttagacaacacaccgacgatggcggccgcagatctcgagttatgatctacttccttaccgtgcaataaattagaatatattttctacttttacgagaaattaattattgtatttattatttatgggtgaaaaacttactataaaaagcgggtgggtttggaattagtgaaagcttaaaaattgaaattttattttttttttttggaatataaataagctcgaagtcgacagatctaggcctggtaccaggaggaggaattcagcttaaagatgacttcgaaagtttatgatccagaacaaaggaaacggatgataactggtccgcagtggtgggccagatgtaaacaaatgaatgttcttgattcatttattaattattatgattcagaaaaacatgcagaaaatgctgttatttttttacatggtaacgcggcctcttcttatttatggcgacatgttgtgccacatattgagccagtagcgcggtgtattataccagatcttattggtatgggcaaatcaggcaaatctggtaatggttcttataggttacttgatcattacaaatatcttactgcatggtttgaacttcttaatttaccaaagaagatcatttttgtcggccatgattggggtgcttgtttggcatttcattatagctatgagcatcaagataagatcaaagcaatagttcacgctgaaagtgtagtagatgtgattgaatcatgggatgaatggcctgatattgaagaagatattgcgttgatcaaatctgaagaaggagaaaaaatggttttggagaataacttcttcgtggaaaccatgttgccatcaaaaatcatgagaaagttagaaccagaagaatttgcagcatatcttgaaccattcaaagagaaaggtgaagttcgtcgtccaacattatcatggcctcgtgaaatcccgttagtaaaaggtggtaaacctgacgttgtacaaattgttaggaattataatgcttatctacgtgcaagtgatgatttaccaaaaatgtttattgaatcggatccaggattcttttccaatgctattgttgaaggcgccaagaagtttcctaatactgaatttgtcaaagtaaaaggtcttcatttttcgcaagaagatgcacctgatgaaatgggaaaatatatcaaatcgttcgttgagcgagttctcaaaaatgaacaagcggccgccgccaccatgagcaagggcgaggaactgttcactggcgtggtcccaattctcgtggaactggatggcgatgtgaatgggcacaaattttctgtcagcggagagggtgaaggtgatgccacatacggaaagctcaccctgaaattcatctgcaccactggaaagctccctgtgccatggccaacactggtcactaccttcacctatggcgtgcagtgcttttccagatacccagaccatatgaagcagcatgactttttcaagagcgccatgcccgagggctatgtgcaggagagaaccatctttttcaaagatgacgggaactacaagacccgcgctgaagtcaagttcgaaggtgacaccctggtgaatagaatcgagctgaagggcattgactttaaggaggatggaaacattctcggccacaagctggaatacaactataactcccacaatgtgtacatcatggccgacaagcaaaagaatggcatcaaggtcaacttcaagatcagacacaacattgaggatggatccgtgcagctggccgaccattatcaacagaacactccaatcggcgacggccctgtgctcctcccagacaaccattacctgtccacccagtctgccctgtctaaagatcccaacgaaaagagagaccacatggtcctgctggagtttgtgaccgctgctgggatcacacatggcatggacgagctgtacaagtgagcggccgccctgctagcaagcttgctagcggccgctcgagatctgcggccgctacagacacgaatatgactaaaccgatgaccatttaaaaacccctctctagctttcacttaaactgtatcgatcattcttttagcacatgtataatataaaaacattattctatttcgaatttaggcttccaaaaatttttcatccgtaaaccgataataatatatatagacttgttaatagtcggaataaatagattaatgcttaaactatcatcatctccacgattagagatacaatatttacattctttttgctgtttcgaaactttatcaatacacgttaatacaaacccaggaaggagatattgaaactgaggctgttgaaaatgaaacggtgaatacaataattcagataatgtaaaatcatgattccgtattctgatgatattagaactgctaatggatgtcgatggtatgtatctaggagtatctattttaacaaagcatcgatttgctaatatacaattatccttttgattaattgttattttattcatattcttaaaaggtttcatatttatcaattcttctacattaaaaatttccatttttaatttatgtagccccgcaatactcctcattacgtttcattttttgtctataatatccattttgttcatctcggtacatagattatccaattgagaagcgcatttagtagttttgtacattttaagtttattgacgaatcgtcgaaaactagttatagttaacattttattatttgataccctgatattaatacccctgccgttactattatttataactgatgtaatccacgtaacattggaattaactatcgatagtaatgcatcgacgcttccaaaattgtctattataaactcaccgataatttttttattgcatgttttcatattcattaggattatcaaatctttaatcttattacgattgtatgcgttgatattacaagacgtcattctaaaagacggaggatctccatcaaatgccagacaatcacgtacaaagtacatggaaataggttttgttctattgcgcatcatagatttatatagaacacccgtagaaatactaatttgttttactctataaaatactaatgcatctatttcatcgttttgtataacgtctttccaagtgtcaaattccaaatttttttcattgatagtaccaaattcttctatctctttaactacttgcatagataggtaattacagtgatgcctacatgccgttttttgaaactgaatagatgcgtctagaagcgatgctacgctagtcacaatcaccactttcatatttagaatatatatatgtaaaaatatagtagaatttcattttgtttttttctatgctataaatgaattctcattttgcatctgctcatactccgttttatattaataccaaagaaggaagatatctggttctaaaagccgttaaagtatgcgatgttagaactgtagaatgcgaaggaagtaaagcttcctgcgtactcaaagtagataaaccctcatcgcccgcgtgtgagagaagaccttcgtccccgtccagatgcgagagaatgaataaccctggaaaacaagttccgtttatgaggacggacatgctacaaaatatgttcgcggctaatcgcgataatgtagcttctagacttttgtcctaaaatactattatatccttttcgatattaataaatccgtgtcgtccaggttttttatctctttcagtatgtgaatagataggtattttatctctattcatcatcgaatttaagagatccgataaacattgtttgtattctccagatgtcagcatctgatacaacaatatatgtgcacataaacctctggcacttatttcatgtaccttccccttatcactaaggagaatagtatttgagaaatatgtatacatgatattatcatgaattagatatacagaatttgtaacactctcgaaatcacacgatgtgtcggcgttaagatctaatatatcactcgataacacattttcatctagatacactagacattttttaaagctaaaatagtctttagtagtaacagtaactatgcgattattttcatcgatgatacatttcatcggcatattattacgcttaccatcaaagactataccatgtgtatatctaacgtattctagcatggttgccatacgcgcattaaacttttcaggatctttggatagatcttccaatctatctatttgagaaaacatttttatcatgttcaatagttgaaacgtcggatccactatatagatattatctataaagattttaggaactacgttcatggtatcctggcgaatattaaaactatcaatgatatgattatcgttttcatcttttatcaccatatagtttctaagatatgggattttacttaatataatattatttcccgtgataaattttattagaaaggccaaatctataagaaaagtcctagaattagtctgaagaatatctatatcgccgtatagtatatttggattaattagatatagagaatatgatccgtaacatatacaacttttattatggcgtctaagatattcttccatcaacttattaacatttttgactagggaagatacattatgacgtcccattacttttgccttgtctattactgcgacgttcatagaatttagcatatctcttgccaattcttccattgatgttacattataagaaattttagatgaaattacatttggagctttaatagtaagaactcctaatatgtccgtgtatgtggtcactaatacagattgtagttctataatcgtaaataatttacctatattatatgtttgagtctgtttagaaaagtagctaagtatacgatcttttatttctgatgcagatgtattaacatcggaaaaaaatctttttttattcttttttactaaagatacaaatatgtctttgttaaaaacagttattttctgaatatttctagcttgtaattttaacatatgatattcgttcacactaggtactctgcctaaataggtttctataatctttaatgtaatattaggaaaagtattctgatcaggattcctattcattttgaggatttaaaactctgattattgtctaatatggtctctacgcaaactttttcacagagcgatagagtttttgataactcgtttttcttaagaaatataaaactactgtctccagagctcgctctatcttttattttatctaattcgatacaaactcctgatactggttcagaaagtaattcattaattttcagtcctttatagaagatatttaatatagataatacaaaatcttcagtttttgatatcgatctgattgatcctagaactagatatattaataacgtgctcattaggcagtttatggcagcttgataattagatatagtatattccagttcatatttattagataccgcattgcccagattttgatattctatgaattcctctgaaaataaatccaaaataactagacattctattttttgtggattagtgtactctcttccctctatcatgttcactactggtgtccacgatgataaatatctagagggaatataatatagtccataggatgccaatctagcaatgtcgaataactgtaattttattcttcgctcttcattatgaattgattcttgaggtataaacctaacacaaattatattattagacttttcgtatgtaatgtctttcatgttataagtttttaatcctggaatagaatctattttaatgaggcttttaaacgcagagttctccaacgagtcaaagcataatactctgttgtttttcttatatacgatgttacgattttcttctttgaatggaataggtttttgaattagtttataattacaacataatagataaggaagtgtgcaaatagtacgcggaaaaaacataatagctcccctgttttcatccatggttttaagtaaatgatcactggcttctttagtcaatggatattcgaacattaaccgtttcatcatcattggacagaatccatatttcttaatgtaaagagtgatcaaatcattgtgtttattgtaccatcttgttgtaaatgtgtattcggttatcggatctgctcctttttctattaaagtatcgatgtcaatctcgtctaagaattcaactatatcgacatatttcatttgtatacacataaccattactaacgtagaatgtataggaagagatgtaacgggaacagggtttgttgattcgcaaactattctaatacataattcttctgttaatacgtcttgcacgtaatctattatagatgccaagatatctatataattattttgtaagatgatgttaactatgtgatctatataagtagtgtaataattcatgtattttgatatatgttccaactctgtctttgtgatgtctagtttcgtaatatctatagcatcctcaaaaaatatattcgcatatattcccaagtcttcagttctatcttctaaaaaatcttcaacgtatggaatataataatctattttacctcttctgatatcattaatgatatagtttttgacactatcttctgtcaattgattcttattcactatatctaagaaacggatagcgtccctaggacgaactactgccattaatatctctattatagcttctggacataattcatctattataccagaattaatgggaactattccgtatctatctaacatagttttaagaaagtcagaatctaagacttgatgttcatatattggttcatacatgaaatgatctctattgatgatagtgactatttcattctctgaaaattggtaactcattctatatatgctttccttgttgatgaaggatagaatatactcaatagaatttgtaccaacaaactgttctcttatgaatcgtatatcatcatctgaaataatcatgtaaggcatacatttaacaattagagacttgtctcctgttatcaatatactattcttgtgataatttatgtgtgaggcaaatttgtccacgttctttaattttgttatagtagatatcaaatccaatggagctacagttcttggcttaaacagatatagtttttctggaacaaattctacaacattattataaaggactttgggtagataagtgggatgaaatcctattttaattaatgcgatagccttgtcctcgtgcagatatccaaacgcttttgtgatagtatggcattcattgtctagaaacgctctacgaatatctgtgacagatatcatctttagagaatatactagtcgcgttaatagtactacaatttgtattttttaatctatctcaataaaaaaattaatatgtatgattcaatgtataactaaactactaactgttattgataactagaatcagaatctaatgatgacgtaaccaagaagtttatctactgccaatttagctgcattatttttagcatctcgtttagattttccatcggccttatcgaatactcttccgtcgatgtctacacaggcataaaatgtaggagagttactaggcccaactgattcaatacgaaaagaccaatctctcctagtaatttggcagtactcattaataacggtgacagggttagcatctttccaatcaataatttttttagccggaataacatcatcaaaagacttatgatcctctctcattgatttttcgcgggatacatcatctattatgacgtcagccatagcatcagcatccggcttatccgcctccgttgtcataaaccaacgaggaggaatatcgtcggagctgtacaccatagcactacgttgaagatcgtacagagctttattaacttctcgcttctccatattaagttgtctagttagttgtgcagcagtagctccttcgattccaatgtttttaatagccgcacacacaatctctgcgtcagaacgctcgtcaatatagatcttagacatttttagagagaactaacgcaaccagcaataaaactgaacctactttatcatttttttattcatcatcctctggtggttcgtcgttcctatcaaatgtagctctgattaacccgtcatctataggtgatgctggttctggagattctggaggagatggattattatctggaagaatctctgttatttccttgttttcatgtatcgattgcgttgtaacattaagattgcgaaatgctctaaatttgggaggcttaaagtgttgtttgcaatctctacacgcgtgtctaactagtggaggttcgtcagctgctctagtttgaatcatcatcggcgtagtattcctacttttacagttaggacacggtgtattgtatttctcgtcgagaacgttaaaataatcgttgtaactcacatcctttattttatctatattgtattctactcctttcttaatgcattttataccgaataagagatagcgaaggaattctttttcggtgccgctagtacccttaatcatatcacatagtgttttatattccaaatttgtggcaatagacggtttatttctatacgatagtttgtttctggaatcctttgagtattctataccaatattattctttgattcgaatttagtttcttcgatattagattttgtattacctatattcttgatgtagtactttgatgatttttccatggcccattctattaagtcttccaagttggcatcatccacatattgtgatagtaattctcggatatcagtagcggctaccgccattgatgtttgttcattggatgagtaactactaatgtatacattttccatttataacacttatgtattaactttgttcatttatattttttcattattatgttgatattaacaaaagtgaatatatatatgttaataattgtattgtggttatacggctacaattttataatgagtgaaagtcagtgtccgatgatcaatgacgatagctttactctgaaaagaaagtatcaaatcgatagtgcggagtcaacaataaaaatggataagaagaggataaagtttcagaatagagccaaaatggtaaaagaaataaatcagacaataagagcagcacaaactcattacgagacattgaaactaggatacataaaatttaagagaatgattatgactactactctagaagatatagcaccatctattccaaataatcagaaaacttataaactattctcggacatttcagccatcggcaaagcatcacagaatccgagtaagatggtatatgctctgctgctttacatgtttcccaatttgtttggagatgatcatagattcattcgttatagaatgcatccaatgagtaaaatcaaacacaagatcttctctcctttcaaacttaatcttattagaatattagtggaagaaagattctataataatgaatgcagatctaataaatggagaataattggaacacaagttgataaaatgttgatagctgaatctgataaatatacaatagatgcaaggtataacctaaaacccatgtatagaatcaagggagaatctgaagaagataccctctttatcaaacagatggtagaacaatgtgtgacatcccaggaattggtggaaaaagtgttgaagatactgtttagagatttgttcaagagtggagaatacaaagcgtacagatacgatgatgatgtagaaaatggatttattggattggatacactaaaattaaacattgttcatgatatagttgaaccatgtatgcctgttcgtaggccagtggctaagatactgtgtaaagaaatggtaaataaatactttgagaatccgctacatattattggtaaaaatcttcaagagtgcattgactttgttagtgaataggcatttcatctttctccaatactaattcaaattgttaaattaataatggatagtataaatagttattagttataagatagtaaaaataattattagaataagagtgtagtatcatagataactctcttctataaaaatggattttattcgtagaaagtatcttatatacacagtagaaaataatatagattttttaaaggatgatacattaagtaaagtaaacaattttaccctcaatcatgtactagctctcaagtatctagttagcaattttcctcaacacgttattactaaggatgtattagctaataccaatttttttgttttcatacatatggtacgatgttgtaaagtgtacgaagcggttttacgacacgcatttgatgcacccacgttgtacgttaaagcattgactaagaattatttatcgtttagtaacgcaatacaatcgtacaaggaaaccgtgcataaactaacacaagatgaaaaatttttagaggttgccgaatacatggacgaattaggagaacttataggcgtaaattatgacttagttcttaatccattatttcacggaggggaacccatcaaagatatggaaatcatttttttaaaactgtttaagaaaacagacttcaaagttgttaaaaaattaagtgttataagattacttatttgggcatacctaagcaagaaagatacaggcatagagtttgcggataatgatagacaaaatatatacactctatttcaacaaactggtagaatcgtccatagcaatctaacagaaacgtttagagattatatctttcccggagataagactagctattgggtgtggttaaacgaaagtatagctaatgatgcggatatcgttcttaatagacacgccattaccatgtatgataaaattcttagttatatatactctgagataaaacaaggacgcgttaataaaaacatgcttaagttagtttatatctttgagcctgaaaaagatatcagagaacttctgctagaaatcatatatgatattcctggagatatcctatctattattgatgcaaaaaacgacgattggaaaaaatattttattagtttttataaagctaattttattaacggtaatacatttattagtgatagaacgtttaacgaggacttattcagagttgttgttcaaatagatcccgaatatttcgataatgaacgaattatgtctttattctctacgagtgctgcggacattaaacgatttgatgagttagatattaataacagttatatatctaatataatttatgaggtgaacgatatcacattagatacaatggatgatatgaagaagtgtcaaatctttaacgaggatacgtcgtattatgttaaggaatacaatacatacctgtttttgcacgagtcggatcccatggtcatagagaacggaatactaaagaaactgtcatctataaaatccaagagtagacggctgaacttgtttagcaaaaacattttaaaatattatttagacggacaattggctcgtctaggtcttgtgttagatgattataaaggagacttgttagttaaaatgataaaccatcttaagtctgtggaggatgtatccgcattcgttcgattttctacagataaaaaccctagtattcttccatcgctaatcaaaactattttagctagttataatatttccatcatcgtcttatttcaaaggtttttgagagataatctatatcatgtagaagaattcttggataaaagcatccatctaaccaagacggataagaaatatatacttcaattgataagacacggtagatcatagaacagaccaaatatattattaataatttgtatatacatagatataattatcacacatttttgataaatgggaactgctgcaacaattcagactcccaccaaattaatgaataaagaaaatgcagaaatgattttggaaaaaattgttgatcatatagttatgtatattagtgacgaatcaagtgattcagaaaataatcctgaatatattgattttcgtaacagatacgaagactatagatctctcattataaaaagtgatcacgagtttgtaaagctatgtaaaaatcatgcggagaaaagttctccagaaacgcaacaaatgattatcaaacacatatacgaacaatatcttattccagtatctgaagtactattaaaacctataatgtccatgggtgacataattacatataacggatgtaaagacaatgaatggatgctagaacaactctctaccctaaactttaacaatctccgcacatggaactcatgtagcataggcaatgtaacgcgtctgttttatacattttttagttatctgatgaaagataaactaaatatataagtataatcccattctaatactttaacctgatgtattagcatcttattagaatattaacctaactaaaagacataacataaaaactcattacatagttgataaaaagcggtaggatataaatattatggctgccaccgttccgcgttttgacgacgtgtacaaaaatgcacaaagaagaattctagatcaagaaacattttttagtagaggtctaagtagaccgttaatgaaaaacacatatctatttgataattacgcgtatggatggataccagaaactgcaatttggagtagtagatacgcaaacctagatgctagtgactattatcccatttcgttgggattacttaaaaagttcgagtttctcatgtctctatataaaggtcctattcccgtatatgaagaaaaagtaaatactgaattcatagccaatggatcgttctctggtagatacgtatcatatcttcgaaagttttctgcccttccaacaaacgagtttattagttttttgttactgacttccattccaatctataatatcttgttctggtttaaaaacacacagtttgatattactaaacacacattattcagatacgtctatacagataatgccaaacacctggcgttggctaggtatatgcatcaaacaggagactataagcctttgtttagtcgtctcaaagagaattatatatttaccggtcccgttccaataagtatcaaagatatagatcaccctaatcttagtagagcaagaagtccatccgattatgagacattagctaatattagtactatattgtactttaccaagtatgatccggtattaatgtttttattgttttacgtacctgggtattcaattactacaaaaattactccagccgtagaatatctaatggataaactgaatctaacaaagagcgacgtacaactgttgtaaattattttatgcttcgtaaaatgtaggttttgaaccaaacattctttcaaagaatgagatgcataaaactttattatccaatagattgactatttcggacgtcaatcgtttaaagtaaacttcgtaaaatattctttgatcactgccgagtttaaaacttctatcgataattgtctcatatgttttaatatttacaagttttttggtccatggtacattagccggacaaatatatgcaaaataatatcgttctccaagttctatagtttctggattatttttattatattcagtaactaaatacatattagggttatctgcggatttataatttgagtgatgcattctactcaacataaataattctagaggagacgatctactatcaaattcggatcgtaaatctgtttctaaagaacggagaatatctatacatacctgattagaattcatccgtccttcagacaacatctcagacagtctggttttgtacatcttaatcatattcttatgaaacttggaaacatctcttctagtttcactagtacctttattaattctctcaggtacagattttgaattcgacgatgctgagtatttcatcgttgtatatttcttcttcgattgcataatcagattcttatataccgcctcaaactctattttaaaattattaaacaatactctattattaatcagtcgttctaactctttcgctatttctatagacttatctacatcttgactgtctatctctgtaaacacggagtcggtatctccatacacgctacgaaaacgaaatctgtaatctataggcaacgatgttttcacaatcggattaatatctctatcgtccatataaaatggattacttaatggattggcaaaccgtaacataccgttagataactctgctccatttagtaccgattctagatacaagatcattctacgtcctatggatgtgcaactcttagccgaagcgtatgagtatagagcactatttctaaatcccatcagaccatatactgagttggctactatcttgtacgtatattgcatggaatcatagatggccttttcagttgaactggtagcctgttttagcatctttttatatctggctctctctgccaaaaatgttcttaatagtctaggaatggttccttctatcgatctatcgaaaattgctatttcagagatgaggttcggtagtctaggttcacaatgaaccgtaatatatctaggaggtggatatttctgaagcaatagctgattatttatttcttcttccaatctattggtactaacaacgacaccgactaatgtttccggagatagatttccaaagatacacacattaggatacagactgttataatcaaagattaatacattattactaaacattttttgttttggagcaaataccttaccgccttcataaggaaacttttgttttgtttctgatctaactaagatagttttagtttccaacaatagctttaacagtggacccttgatgactgtactcgctctatattcgaataccatggattgaggaagcacatatgttgacgcacccgcgtctgtttttgtttctactccataatactcccacaaatactgacacaaacaagcatcatgaatacagtatctagccatatctaaagctatgtttagattataatccttatacatctgagctaaatcaacgtcatcctttccgaaagataatttatatgtatcattaggtaaagtaggacataatagtacgactttaaatccattttcccaaatatctttacgaattactttacatataatatcctcatcaacagtcacataattacctgtggttaaaacctttgcaaatgcagcggctttgcctttcgcgtctgtagtatcgtcaccgatgaacgtcatttctctaactcctctatttaatactttacccatgcaactgaacgcgttcttggatatagaatccaatttgtacgaatccaatttttcaaatttttgaatgaatgaatatagatcgaaaaatatagttccattattgttattaacgtgaaacgtagtattggccatgccgcctactcccttatgactagactgatttctctcataaatacagagatgtacagcttcctttttgtccggagatctaaagataattttctctcctgttaataactctagacgattagtaatatatctcagatcaaagttatgtccgttaaaggtaacgacgtagtcgaacgttagttccaacaattgtttagctattcgtaacaaaactatttcagaacatagaactagttctcgttcgtaatccatttccattagtgactgtatcctcaaacatcctctatcgacggcttcttgtatttcctgttccgttaacatctcttcattaatgagcgtaaacaataatcgtttaccacttaaatcgatataacagtaacttgtatgcgagattgggttaataaatacagaaggaaacttcttatcgaagtgacactctatatctagaaataagtacgatcttgggatatcgaatctaggtatttttttagcgaaacagttacgtggatcgtcacaatgataacatccattgttaatctttgtcaaatattgctcgtccaacgagtaacatccgtctggagatatcccgttagaaatataaaaccaactaatattgagaaattcatccatggtggcattttgtatgctgcgtttctttggctcttctatcaaccacatatctgcgacggagcattttctatctttaatatctagattataacttattgtctcgtcaatgtctatagttctcatctttcccaacggcctcgcattaaatggaggaggagacaatgactgatatatttcgtccgtcactacgtaataaaagtaatgaggaaatcgtataaatacggtctcgccatttcgacatctggatttcagatataaaaatctgttttcaccgtgactttcaaaccaattaatgcaccgaacatccatttatagaatttagaaatatattttcatttaaatgaatcccaaacattggggaagagccgtatggaccattatttttatagtactttcgcaagcgggtttagacggcaacatagaagcgtgtaaacgaaaactatatactatagttagcactcttccatgtcctgcatgtagacggcacgcgactatcgctatagaggacaataatgtcatgtctagcgatgatctgaattatatttattattttttcatcagattatttaacaatttggcatctgatcccaaatacgcgatcgatgtgacaaaggttaaccctttataaacttaacccattataaaacttatgattagtcacaactgaaataaccgcgtgattattttttggtataattctacacggcatggtttctgtgactatgaattcaacccccgttacattagtgaaatctttaacaaacagcaagggttcgtcaaagacataaaactcattgtttacaatcgaaatagaccccctatcacacttaaaataaaaaatatccttatcctttaccaccaaataaaattctgattggtcaatgtgaatgtattcacttaacagttccacaaatttatttattaactccgaggcacatacatcgtcggtattttttatggcaaactttactcttccagcatccgtttctaaaaaaatattaacgagttccatttatatcatccaatattattgaaatgacgttgatggacagatgatacaaataagaaggtacggtacctttgtccaccatctcctccaattcatgctctattttgtcattaactttaatgtatgaaaacagtacgccacatgcttccatgacagtgtgtaacactttggatacaaaatgtttgacattagtataattgtccaagactgtcaatctataatagatagtagctataatatattctatgatggtattgaagaagatgacaaccttggcatattgatcatttaacacagacatggtatcaacagatagcttgaatgaaagagaatcagtaattggaataagcgtcttctcgatagagtgtccgtataccaacatgtctgatattttgatgtattccattaaattatttagttttttctttttattctcgttaaacagcatttctgtcaacggaccccaacatcgttgaccgattaagttttgattgatttttccgtgtaaggcgtatctagtcagatcgtatagcctatccaataatccatcgtctgtgtgtagatcacatcgtacactttttaattctctatagaagagcgacagacatctggagcaattacagacagcaatttctttattctctacagatgtaagatacttgaagacattcctatgatgatgcagaattttggataacacggtattgatggtatctgttaccataattcctttgatggctgatagtgtcagagcacaagatttccaatctttgacaatttttagcaccattatctttgttttgatatctatatcagacagcatggtgcgtctgacaacacagggattaagacggaaagatgaaatgattctctcaacatcttcaatagataccttgctattttttctggcattatctatatgtgcgagaatatcctctagagaatcagtatcctttttgatgatagtggatctcaatgacatgggacgtttaaaccttcttattctatcaccagattgcatggtgatttgtcttctttcttttatcataatgtaatctctaaattcatcggcaaattgtctatatctaaaatcataatatgagatgtttacctctacaaatatctgttcgtccaatgttagagtatttacatcagttttgtattccaaattaaacatggcaacggatttaattttatattcctctattaagtcctcgtcgataataacagaatgtagataatcatttaatccgtcgtacatggttggaagatgcttgttgacaaaatctttaattgtcttgatgaaggtgggactatatctaacatcttgattaataaaatttataacattgtccataggatactttgtaactagttttatacacatctcttcatcggtaagtttagacagaatatcgtgaacaggtggtatattatattcatcagatatacgaagaacaatgtccaaatctatattgtttaatatattatatagatgtagcgtagctcctacaggaatatctttaactaagtcaatgatttcatcaaccgttagatctattttaaagttaatcatataggcattgatttttaaaaggtatgtagccttgactacattctcattaattaaccattccaagtcattgtgtgtaagaagattatattctatcataagcttgactacatttggtcccgataccattaaagaattcttatgatataaggaaacagattttaggtactcatctactctacaagaattttggagagccttaacgatatcagtgacgtttattatttcaggaggaaagaatctaacattgagaatatcggaattaatagcttccagatacagtgattttggcaatagtccgtgtaatccataatccagtaacacgagctggtgcttgctagacaccttttcaatgtttaatttttttgaaataagctttgataaagccttcctcgcaaattccggatacatgaacatgtcggcgacatgattaagtattgttttttcattatttttatattttctcaacaagttctcaataccccaatagatgatagaatatcacccaatgcgtccatgttgtctatttccaacaggtcgctatatccaccaatagaagtttttccaaaaaagattctaggaacagttctaccaccagtaatttgttcaaaataatcccgcaattcattttcgggtttaaattctttaatatcgacaatttcatacgctcctcttttgaaactaaacttatttagaatatccagtgcatttctacaaaaaggacatgtatacttgacaaaaattgtcactttgttattggccaacctttgttgtacaaattcctcggccattttaatatttaagtgatataaaactatctcgacttatttaactctttagtcgagatatatggacgcagatagctatatgatagccaactacagaaggcaaacgctataaaaaacataattacgacgagcatatttataaatatttttattcagcattacttgatatagtaatattaggcacagtcaaacattcaaccactctcgatacattaactctctcattttctttaacaaattctgcaatatcttcgtaaaaagattcttgaaactttttagaatatctatcgactctagatgaaatagcgttcgtcaacatactatgttttgtatacataaaggcgcccattttaacagtttctagtgacaaaatgctagcgatcctaggatcctttagaatcacatagattgacgattcgtctctcttagtaactctagtaaaataatcatacaatctagtacgcgaaataatattatccttgacttgaggagatctaaacaatctagttttgagaacatcgataagttcatcgggaatgacatacatactatctttaatagaactcttttcatccagttgaatggattcgtccttaaccaactgattaatgagatcttctattttatcattttccagatgatatgtatgtccattaaagttaaattgtgtagcgcttctttttagtctagcagccaatactttaacatcactaatatcgatatacaaaggagatgatttatctatggcattaagaattcgtttttcgacatccgtcaaaaccaattcctttttgcctgtatcatccagttttccatcctttgtaaagaaattattttctactagactattaataagactgataaggattcctccataattgcacaatccaaactttttaacaaaactagactttacgagatctacaggaatgcgtacttcaggttttttagcttgtgattttttcttttgcggacattttctagtaaccaactcatctaccatttcattgattttagcagtgaaataagctttcaatgcacgggcactgatactattgaaaacgagttgatcttcaaattccgccatttaagttcaccaaacaacttttaaatacaaatatatcaatagtagtagaataagaactataaaaaaaataataattaaccaaccccaacaaccggtattattagttgatgtggtagttttctcatcacttagaacagatttaacaatttctataaagtctgtcaaatcatcttccggagaccccataaatacaccaaatatagcggcgtacaacttatccatttatacattgaatattggcttttctttatcgctatcttcatcatattcatcatcaatatcaacaagtcccagattacgagccagatcttcttctacattttcagtcattgatacacgttcactatctccagagagtccgataacgttagccaccacttctctatcaatgattagtttcttgagcgcgaaagtaatttttgtttccgttccggatctatagaagacgataggtgtgataattgccttggccaattgtctttctcttttactgagtgattctagttcaccttctatagatctgagaatggatgattctccagtcgaaacatattctaccatggatccgtttaatttgttgatgaagatggattcatccttaaatgttttctctgtaatagtttccaccgaaagactatgcaaagaatttggaatgcgttccttgtgcttaatgtttccatagacggcttctagaagttgatacaacataggactagccgcggtaacttttatttttagaaagtatccatcgcttctatcttgtttagatttatttttataaagtttagtctctccttccaacataataaaagtggaagtcatttgactagataaactatcagtaagttttatagagatagacgaacaattagcgtattgagaagcatttagtgtaacgtattcgatacattttgcattagatttactaatcgattttgcatactctataacacccgcacaagtctgtagagaatcgctagatgcagtaggtcttggtgaagtttcaactctcttcttgattaccttactcatgattaaacctaaataattgtactttgtaatataatgatatatattttcactttatctcatttgagaataaaaatgtttttgtttaaccactgcatgatgtacagatttcggaatcgcaaaccaccagtggttttattttatccttgtccaatgtgaattgaatgggagcggatgcgggtttcgtacgtagatagtacattcccgtttttagaccgagactccatccgtaaaaatgcatactcgttagtttggaataactcggatctgctatatggatattcatagattgactttgatcgatgaaggctcccctgtctgcagccatttttatgatcgtcttttgtggaatttcccaaatagttttataaactcgcttaatatcttctggaaggtttgtattctgaatggatccaccatctgccataatcctattcttgatctcatcattccataattttctctcggttaaaactctaaggagatgcggattaactacttgaaattctccagacaatactctccgagtgtaaatattactggtatacggttccaccgactcattatttcccaaaatttgagcagttgatgcagtcggcataggtgccaccaataaactatttctaagaccgtatgttctgattttatcttttagaggttcccaattccaaagatccgacggtacaacattccaaagatcatattgtagaataccgttactggcgtacgatcctacatatgtatcgtatggtccttccttctcagctagttcacaactcgcctctaatgcaccgtaataaatggtttcgaagatcttcttatttagatcttgtgcttccaggctatcaaatggataatttaagagaataaacgcgtccgctaatccttgaacaccaataccgataggtctatgtctcttattagagatttcagcttctggaataggataataattaatatctataattttattgagatttctgacaattactttgaccacatccttcagtttgagaaaatcaaatcgcccatctattacaaacatgttcaaggcaacagatgccagattacaaacggctacctcattagcatccgcatattgtattatctcagtgcaaagattactacacttgatagttcctaaattttgttgattactctttttgttacacgcatccttataaagaatgaatggagtaccagtttcaatctgagattctataatcgctttccagacgactcgagcctttattatagatttgtatctcctttctctttcgtatagtgtatacaatcgttcgaactcgtctccccaaacattgtccaatccaggacattcatccggacacatcaacgaccactctccgtcatccttcactcgtttcataaagagatcaggaatccaaagagctataaatagatctctggttctatgttcctcgtttcctgtattctttttaagatcgaggaacgccataatatcagaatgccacggttccaagtatatggccataactccaggccgtttgtttcctccctgatctatgtatctagcggtgttattataaactctcaacattggaataataccgtttgatataccattggtaccggagatatagcttccactggcacgaatattactaattgatagacctattccccctgccattttagagattaatgcgcatcgttttaacgtgtcatagataccctctatgctatcatcgatcatgttaagtagaaaacagctagacatttggtgacgactagttcccgcattaaataaggtaggagaagcgtgcgtaaaccatttttcagaaagtagattgtacgtctcaatagctgagtctatatcccattgatgaattcctactgcgacacgcattaacatgtgctgaggtctttcaacgatcttgttgtttattttcaacaagtaggatttttccaaagttttaaaaccaaaatagttgtatgaaaagtctcgttcgtaaataataaccgagttgagtttatccttatatttgttaactatatccatggtgatacttgaaataatcggagaatgtttcccatttttaggattaacatagttgaataaatcctccatcacttcactaaatagtttttttgtttccttgtgtagatttgatacggctattctggcggctagaatggcataatccggatgttgtgtagtacaagtggctgctatttcggctgccagagtgtccaattctaccgttgttactccattatatattccttgaataaccttcatagctattttaataggatctatatgatccgtgtttaagccataacataattttctaatacgagacgtgattttatcaaacatgacattttccttgtatccatttcgtttaatgacaaacatttttgttggtgtaataaaaaaattatttaacttttcattaatagggatttgacgtatgtagcgtacaaaatgattgttcctggtatatagataaagagtcctatatatttgaaaatcgttacggctcgattaaactttaatgattgcatagtgaatatatcattaggatttaactccttgactatcatggcggcgccagaaattaccatcaaaagcattaatacagttataccgatcgcagttagaacggttatagcatccaccatttatatctaaaaattagatcaaagaatatgtgacaaagtcctagttgtatactgagaattgacgaaacaatgtttcttacatatttttttcttattagtaaccgacttaatagtaggaactggaaaactagacttgattattctataagtatagatacccttccaaataatattctctttgataaaagttccagaaaatgtagaattttttaaaaagttatcttttgctattaccaagattgtgtttagacgcttattattaatatgagtgatgaaatccacaccgcctctagatatcgcctttatttccacattagatggtaaatccaatagtgaaactatctttttaggaatgtatggactcgcgtttagaggagtaaacgtcttaggcgtcggaaaggatgattcatcaaacgaataaacaatttcacaaatggatgttaatgtattagtaggaaattttttgacgctattggaattgaagattctaatggatgatgttctacctatttcatccgataacatgttaatttccgacaccaacggttttaatatttcgatgatatacggtagtctctctttcggacttatatagcttattccacaatacgagtcattatatactccaaaaaacaaaataactagtataaaatctgtatcgaatgggaaaaacgaaattatcgacataggtatagaatccggaacattgaacgtattaatacttaattctttttctgtggtaagtaccgataggttattgacattgtatggttttaaatattctataacttgagacttgatagatattagtgatgaattgaaaattatttttatcaccacgtgtgtttcaggatcatcgtcgacgcccgtcaaccaaccgaacggagtaaaataaatatcattaatatatgctctagatattagtatttttatcaatcctttgattatcatcttctcgtaggcgaatgattccatgatcaagagtgatttaagaacatcctccggagtattaatgggcttagtaaacagtccatcgttgcaataataaaagttatccaagttaaaggatattatgcattcgtttaaagatatcacctcatctgacggagacaattttttggtaggttttagagactttgaagctacttgtttaacaaagttattcatcgtcgtctactattctatttaattttgtagttaatttatcacatatcacattaattgactttttggtccacttttccatacgtttatattcttttaatcctgcgttatccgtttccgttatatccagggatagatcttgcaagttaaatagaatgctcttaaataatgtcattttcttatccgctaaaaatttaaagaatgtataaacctttttcagagatttgaaactcttaggtggtgtcctagtacacaatatcataaacaaactaataaacattccacattcagattccaacagctgattaacttccacattaatacagcctattttcgctccaaatgtacattcgaaaaatctgaataaaacatcgatgtcacaatttgtattatccaatacagaatgtttgtgattcgtgttaaaaccatcggagaaggaatagaaataaaaattattatagtggtggaattcagttggaatattgcctccggagtcataaaaggatactaaacattgttttttatcataaattacacatttccaatgagacaaataacaaaatccaaacattacaaatctagaggtagaacttttaattttgtctttaagtatatacgataagatatgtttattcataaacgcgtcaaatttttcatgaatcgctaaggagtttaagaatctcatgtcaaattgtcctatataatccacttcggatccataagcaaactgagagactaagttcttaatacttcgattgctcatccaggctcctctctcaggctctattttcatcttgacgacctttggattttcaccagtatgtattcctttacgtgataaatcatcgattttcaaatccatttgtgagaagtctatcgccttagatactttttcccgtagtcgaggtttaaaaaaatacgctaacggtatactagtaggtaactcaaagacatcatatatagaatggtaacgcgtctttaactcgtcggttaactctttcttttgatcgagttcgtcgctactattgggtctgctcaggtgccccgactctactagttccaacatcataccgataggaatacaagacactttgccggcggttgtagatttatcatatttttccactacatatccgttacaatttgttaaaaatttagatacatctatattgctacataatccagctagtgaatatatatgacataataaattggtaaatcctagttctggtattttactaattactaaatctgtatatctttccatttatcatggaaaagaatttaccagatatcttcttttttccaaactgcgttaatgtattctcttacaaatattcacaagatgaattcagtaatatgagtaaaacggaacgtgatagtttctcattggccgtgtttccagttataaaacatagatggcataacgcacacgttgtaaaacataaaggaatatacaaagttagtacagaagcacgtggaaaaaaagtatctcctccatcactaggaaaacccgcacacataaacctaaccgcgaagcaatatatatacagtgaacacacaataagctttgaatgttatagttttctaaaatgtataacaaatacagaaatcaattcgttcgatgagtatatattaagaggactattagaagctggtaatagtttacagatattttccaattccgtaggtaaacgaacagatactataggtgtactagggaataagtatccatttagcaaaattccattggcctcattaactcctaaagcacaacgagagatattttcagcgtggatttctcatagacctgtagttttaactggaggaactggagtgggtaagacgtcacaggtacccaagttattgctttggtttaattatttatttggtggattctctactctagataaaatcactgactttcacgaaagaccagtcattctatctcttcctaggatagctttagttagattgcatagcaataccattttaaaatcattgggatttaaggtactagatggatctcctatttctttacggtacggatctataccggaagaattaataaacaaacaaccaaaaaaatatggaattgtattttctacccataagttatctctaacaaaactatttagttatggcactcttattatagacgaagttcatgagcatgatcaaataggagatattattatagcagtagcgagaaagcatcatacgaaaatagattctatgtttttaatgactgccacgttagaggatgacagggaacggctaaaagtatttttacctaatcccgcatttatacatattcctggagatacactgtttaaaattagcgaggtatttattcataataagataaatccatcttccagaatggcatacatagaagaagaaaagagaaatttagttactgctatacagatgtatactcctcctgatggatcatccggtatagtctttgtggcatccgttgcacagtgtcacgaatataaatcatatttagaaaaaagattaccgtatgatatgtatattattcatggtaaggtcttagatatagacgaaatattagaaaaagtgtattcatcacctaatgtatcgataattatttctactccttatttggaatccagcgttactatacgcaatgttacacacatttatgatatgggtagagtttttgtccccgctccttttggaggatcgcaacaatttatttctaaatctatgagagatcaacgaaaaggaagagtaggaagagttaatcctggtacatacgtctatttctatgatctgtcttatatgaagtctatacagcgaatagattcagaatttctacataattatatattgtacgctaataagtttaatctaacactccccgaagatttgtttataatccctacaaatttggatattctatggcgtacaaaggaatatatagactcgttcgatattagtacagaaacatggaataaattattatccaattattatatgaagatgatagagtatgctaaactttatgtactaagtcctattctcgctgaggagttggataactttgagaggacgggagaattaactagtattgtacgagaagccattttatctctaaatttacaaattaagattttaaattttaaacataaagatgatgatacgtatatacacttttgtaaaatattattcggtgtctataacggaacaaacgctactatatattatcatagacctctaacgggatatatgaatatgatttcagatactatatttgttcctgtagataataactaaaaatcaaactctaatgaccacatctttttttagagatgaaaaattttccacatctccttttgtagacacgactaaacattttgcagaaaaaagtttattagtgtttagataatcgtatacttcatcagtgtagatagtaaatgtgaacagataaaaggtattcttgctcaatagattggtaaattccatagaatatattaatcctttcttcttgagatcccacatcatttcaaccagagacgttttatccaatgatttacctcgtactataccacatacaaaactagattttgcagtgacgtcgtacctggtattcctaccaaacaaaattttacttttagttcttttagaaaattctaaggtagaatctctatttgccaatatgtcatctatggaattaccactagcaaaaaatgatagaaatatatattgatacatcgcagctggttttgatctactatactttaaaaacgaatcagattccataattgcctgtatatcatcagctgaaaaactatgttttacacgtattccttcggcatttctttttaatgatatatcttgtttagacaatgataaagttatcatgtccatgagagacgcgtctccgtatcgtataaatatttcattagatgttagacgcttcattaggggtatacttctataaggtttcttaatcagtccatcattggttgcgtcaagaactactatcggatgttgttgggtatctctagtgttacacatggccttactaaagtttgggtaaataactatgatatctctattaattatagatgcatatatttcattcgtcaaggatattagtatcgacttgctatcgtcattaatacgtgtaatgtaatcatataaatcatgcgatagccaaggaaaatttaaatagatgttcatcatataatcgtcgctataattcatattaatacgttgacattgactaatttgtaatatagcctcgccacgaagaaagctctcgtattcagtttcatcgataaaggataccgttaaatataactggttgccgatagtctcatagtctattaagtggtaagtttcgtacaaatacagaatccctaaaatattatctaatgttggattaatctttaccataactgtataaaatggagacggagtcataactattttaccgtttgtacttactggaatagatgaaggaataatctccggacatgctggtaaagacccaaatgtctgtttgaagaaatccaatgttccaggtcctaatctcttaacaaaaattacgatattcgatcccgatatcctttgcattctatttaccagcatatcacgaactatattaagattatctatcatgtctattctcccaccgttatataaatcgcctccgctaagaaacgttagtatatccatacaatggaatacttcatttctaaaatagtattcgttttctaattctttaatgtgaaatcgtatactagaaagggaaaaattatctttgagttttccgttagaaaagaaccacgaaactaatgttctgattgcgtccgattccgttgctgaattaatggatttacaccaaaaactcatataacttctagatgtagaagcattcgctaaaaaattagtagaatcaaaggatataagtagatgttccaacaagtgagcaattcccaagatttcatctatatcattctcgaatccgaaattagaaattcccaagtagatatcctttttcatccgatcgttgatgaaaatacgaactttattcggtaagacaatcatttactaaggagtaaaataggaagtaatgttcgtatgtcgttatcatcgtataaattaaaggtgtgttttttaccattaagtgacattataattttaccaatattggaattataatataggtgtatttgcgcactcgcgacggttgatgcatcggtaaatatagctgtatctaatgttctagtcggtatttcatcatttcgctgtctaataatagcgttttctctatctgtttccattacagctgcctgaagtttattggtcggataatatgtaaaataataagaaatacatacgaataacaaaaataaaataagatataataaagatgccatttagagatctaattttgtttaacttgtccaaattcctacttacagaagatgaggaatcgttggagatagtgtcttccttatgtagaggatttgaaatatcttataatgacttgataacttactttccagataggaaataccataaatatatttataaagtatttgaacatgtagatttatcggaggaattaagtatggaattccatgatacaactctgagagatttagtctatcttagattgtacaagtattccaagtgtatacggccgtgttataaattaggagataatctaaaaggcatagttgttataaaggacaggaatatttatattagggaagcaaatgatgacttgatagaatatctcctcaaggaatacactcctcagatttatacatattctaatgagcgcgtccccataactggttcaaaattaattctttgtggattttctcaagttacatttatggcgtatacaacgtcgcatataacaacaaataaaaaggtagatgttctcgtttccaaaaaatgtatagatgaactagtcgatccaataaattatcaaatacttcaaaatttatttgataaaggaagcggaacaataaacaaaatactcaggaagatattttattcggtaacaggtggccaaactccataggtagctttttctatttcggattttagaatttccaaattcaccagcgatttatcggttttggtgaaatccaaggatttattaatgtccacaaatgccatttgttttgtctgtggattgtatttgaaaatggaaacgatgtagttagatagatgcgctgcgaagtttcctattagggttccgcgcttcacgtcacccagcatacttgaatcaccatcctttaaaaaaaatgataagatatcaacatggagtatatcatactcgaattttaattcttctactgactcactgacattttcacaaatactacaatacggtttaccgaaaataatcagtacgttcttcatttatgggtatcaaaaacttaaaatcgttactgctggaaaataaatcactgacgatattagatgataatttatacaaagtatacaatggaatatttgtggatacaatgagtatttatatagccgtcgccaattgtgtcagaaacttagaagagttaactacggtattcataaaatacgtaaacggatgggtaaaaaagggagggcatgtaaccctttttatcgatagaggaagtataaaaattaaacaagacgttagagacaagagacgtaaatattctaaattaaccaaggacagaaaaatgttagaattagaaaagtgtacatccgaaatacaaaatgttaccggatttatggaagaagaaataaaggcagaaatgcaattaaaaatcgataaactcacatttcaaatatatttatctgattctgataacataaaaatatcattgaatgagatactaacacatttcaacaataatgagaatgttacattattttattgtgatgaacgagacgcagaattcgttatgtgtctcgaggctaaaacacatttctctaccacaggagaatggccgttgataataagtaccgatcaggatactatgctatttgcatctgctgataatcatcctaagatgataaaaaacttaactcaactgtttaaatttgttccctcggcagaggataactatttagcaaaattaacggcgttagtgaatggatgtgatttctttcctggactctatggggcatctataacacccaccaacttaaacaaaatacaattgtttagtgattttacaatcgataatatagtcactagtttggcaattaaaaattattatagaaagactaactctaccgtagacgtgcgtaatattgttacgtttataaacgattacgctaatttagacgatgtctactcgtatattcctccttgtcaatgcactgttcaagaatttatattttccgcattagatgaaaaatggaatgaatttaaatcatcttatttagaaagcgtgccgttaccctgccaattaatgtacgcgttagaaccacgcaaggagattgatgtttcagaagttaaaactttatcatcttatatagatttcgaaaatactaaatcagatatcgatgttataaaatctatatcctcgatcttcggatattctaacgaaaactgtaacacgatagtattcggcatctataaggataatttactactgagtataaataattcattttactttaacgatagtctgttaataaccaatactaaaagtgataatataataaatataggttactagattaaaaatggtgttccaactcgtgtgctctacatgcggtaaagatatttctcacgaacgatataaattgattatacgaaaaaaatcattaaaggatgtactcgtcagtgtaaagaacgaatgttgtaggttaaaattatctacacaaatagaacctcaacgtaacttaacagtgcaacctctattggatataaactaatatggatccggttaattttatcaagacatatgcgcctagaggttctattatttttattaattataccatgtcattaacaagtcatttgaatccatcgatagaaaaacatgtgggtatttattatggtacgttattatcggaacacttggtagttgaatctacctatagaaaaggagttcgaatagtcccattggatagtttttttgaaggatatcttagtgcaaaagtatacatgttagagaatattcaagttatgaaaatagcagctgatacgtcattaactttattgggtattccgtatggatttggtcatgatagaatgtattgttttaaattggtagctgactgttataaaaatgccggtattgatacatcgtctaaacgaatattgggcaaagatatttttctgagccaaaacttcacagacgataatagatggataaagatatatgattctaataatttaacattttggcaaattgattaccttaaagggtgagttaatatgcataactactcctccgttgttttttccctcgttctttttcttaacgttgtttgccatcactctcataatgtaaagatattctaaaatggtaaacttttgcatatcggacgcagaaattggtataaatgttgtaattgtattatttcccgtcaatggactagtcacagctccatcagttttatatcctttagagtatttctcactcgtgtctaacattctagagcattccatgatctgtttatcgttgatattggccggaaagatagattttttattttttattatattactattggcaattgtagatataacttctggtaaatatttttctaccttttcaatctcttctattttcaagccggctatatattctgctatattgttgctagtatcaataccttttctggctaagaagtcatatgtggtattcactatatcagttttaactggtagttccattagcctttccacttctgcagaataatcagaaattggttctttaccagaaaatccagctactataataggctcaccgatgatcattggcaaaatcctatattgtaccagattaatgagagcatatttcatttccaataattctgctagttcttgagacattgatttatttgatgaatctagttggttctctagatactctaccatttctgccgcatacaataacttgttagataaaatcagggttatcaaagtgtttagcgtggctagaatagtgggcttgcatgtattaaagaatgcggtagtatgagtaaaccgttttaacgaattatatagtctccagaaatctgtggcgttacatacatgagccgaatgacatcgaagattgtccaatatttttaatagctgctctttgtccattatttctatatttgactcgcaacaattgtagataccattaatcaccgattcctttttcgatgccggacaatagcacaattgtttagctttggactctatgtattcagaattaatagatatatctctcaatacagattgcactatacattttgaaactatgtcaaaaattgtagaacgacgctgttctgcagccatttaactttaaataatttacaaaaatttaaaatgagcatccgtataaaaatcgataaactgcgccaaattgtggcatatttttcagagttcagtgaagaagtgtctataaatgtagactcgacggatgagttaatgtatatttttgccgccttgggcggatctgtaaacatttgggcaattatacctctaagtgcatcagtgttttaccgaggagccgaaaatattgtgtttaatcttcctgtgtccaaggtaaaatcgtgtttgtgtagttttcacaatgatgccatcatagatatagaacctgatctggaaaataatctagtaaaactttctagttatcatgtagtaagtgtcgattgtaacaaggaactgatgcctattaggacagatactactatttgtctaagtatagatcaaaagaaatcttacgtgtttaattttcacaagtatgaagaaaaatgttgtggtagaaccgtcattcatctagaatggttgttgggctttatcaagtgtattagtcagcatcagcatctggctattatgtttaaagatgacaatattattatgaagactcctggtaatactgatgcgttttccagggaatattctatgactgaatgttctcaagaactacaaaagttttctttcaaaatagctatctcgtctctcaacaaactacgaggattcaaaaagagagtcaatgtttttgaaactagaatcgtaatggataatgacgataacattttaggaatgttgttttcggatagagttcaatcctttaagatcaacatctttatggcgtttttagattaatactttcaatgagataaatatgggtggcggagtaagtgttgagctccctaaacgggatccgcctccgggagtacccactgatgagatgttattaaacgtggataaaatgcatgacgtgatagctcccgctaagcttttagaatatgtgcatataggaccactagcaaaagataaagaggataaagtaaagaaaagatatccagagtttagattagtcaacacaggacccggtggtctttcggcattgttaagacaatcgtataatggaaccgcacccaattgctgtcgcacttttaatcgtactcattattggaagaaggatggaaagatatcagataagtatgaagagggtgcagtattagaatcgtgttggccagacgttcacgacactggaaaatgcgatgttgatttattcgactggtgtcagggggatacgttcgatagaaacatatgccatcagtggatcggttcagcctttaataggagtaatagaactgtagagggtcaacaatcgttaataaatctgtataataagatgcaaacattatgtagtaaagatgctagtgtaccaatatgcgaatcatttttgcattatttacgcgcacacaatacagaagatagcaaagagatgatcgattatattctaagacaacagtctgcggactttaaacagaaatatatgagatgtagttatcccactagagataagttagaagagtcattaaaatatgcggaacctcgagaatgttgggatccagagtgttcgaatgccaatgttaatttcttactaacacgtaattataataatttaggactttgcaatattgtacgatgtaataccagcgtgaacaacttacagatggataaaacttcctcattaagattgtcatgtggattaagcaatagtgatagattttctactgttcccgtcaatagagcaaaagtagttcaacataatattaaacactcgttcgacctaaaattgcatttgatcagtttattatctctcttggtaatatggatactaattgtagctatttaaatgggtgccgcggcaagcatacagacgacggtgaatacactcagcgaacgtatctcgtctaaattagaacaagaagcgaacgctagtgctcaaacaaaatgtgatatagaaatcggaaatttttatatccgacaaaaccatggatgtaacctcactgttaaaaatatgtgctctgcggacgcggatgctcagttggatgctgtgttatcagccgctacagaaacatatagtggattaacaccggaacaaaaagcatacgtgccagctatgtttactgctgcgttaaacattcagacgagtgtaaacactgttgttagagattttgaaaattatgtgaaacagacttgtaattctagcgcggtcgtcgataacaaattaaagatacaaaacgtaatcatagatgaatgttacggagccccaggatctccaacaaatttggaatttattaatacaggatctagcaaaggaaattgtgccattaaagcgttgatgcaattgacgactaaggccactactcaaatagcacctagacaagttgctggtacaggagttcagttttatatgattgttatcggtgttataatattggcagcgttgtttatgtactatgccaagcgtatgttgttcacatccaccaatgataaaatcaaacttattttagccaataaggaaaacgtccattggactacttacatggacacattctttagaacttctccgatggttattgctaccacggatatgcaaaactgaaaatatattgataatattttaatagattaacatggaagttatcgctgatcgtctagacgatatagtgaaacaaaatatagcggatgaaaaatttgtagattttgttatacacggtctagagcatcaatgtcctgctatacttcgaccattaattaggttgtttattgatatactattatttgttatagtaatttatatttttacggtacgtctagtaagtagaaattatcaaatgttgttggtggtgctagtcatcacattaactattttttattactttatactataatagtactagactgacttctaacaaacatctcacctgccataaataaatgcttgatattaaagtcttctatttctaacactattccatctgtggaaaataatactctgacattatcgctaattgacacatcggtgagtgatatgcctataaagtaataatcttctttgggcacatataccagtgtaccaggttctaacaacctatttactggtgctcctgtagcatactttttctttaccttgagaatatccatcgtttgcttggtcaatagcgatatgtgattttttatcaaccactcaaaaaagtaattggagtgttcatatcctctacgggctattgtctcatggccgtgtatgaaatttaagtaacacgactgtggtagatttgttctatagagccgattgccgcaaatagatagaactaccaatatgtctgtacaaatgttaaacattaattgattaacagaaaaaacaatgttcgttctgggaatagaaaccagatcaaaacaaaattcgttagaatatatgccacgtttatacatggaatataaaataactacagtttgaaaaataacagtatcatttaaacatttaacttgcggggttaatctcacaactttactgtttttgaactgttcaaaatatagcatcgatccgtgagaaatacgtttagccgcctttaatagaggaaatcccaccgcctttctggatctcaccaacgacgatagttctgaccagcaactcatttcttcatcatccacctgttttaacatataataggcaggagatagatatccgtcattgcaatattccttctcgtaggcacacaatctaatattgataaaatctccattctcttctctgcatttattatcttgtctcggtggctgattaggctgtggtcttggtttaggccttggtctatcgttgttgaatctattttggtcattaaatctttcatttcttcctggtatatttctatcacctcgtttggttggatttttgtctatattatcgtttgtaacatcggtacgggtattcatttatcacaaaaaaaacttctctaaatgagtctactgctagaaaacctcatcgaagaagataccatattttttgcaggaagtatatctgagtatgatgatttacaaatggttattgccggcgcaaaatccaaatttccaagatctatgctttctatttttaatatagtacctagaacgatgtcaaaatatgagttggagttgattcataacgaaaatatcacaggagcaatgtttaccacaatgtataatataagaaacaatttgggtctaggagatgataaactaactattgaagccattgaaaactatttcttggatcctaacaatgaagttatgcctcttattattaataatacggatatgactgccgtcattcctaaaaaaagtggtaggagaaagaataagaacatggttatcttccgtcaaggatcatcacctatcttgtgcattttcgaaactcgtaaaaagattaatatttataaagaaaatatggaatccgcgtcgactgagtatacacctatcggagacaacaaggctttgatatctaaatatgcgggaattaatgtcctgaatgtgtattctccttccacatccataagattgaatgccatttacggattcaccaataaaaataaactagagaaacttagtactaataaggaactagaatcgtatagttctagccctcttcaagaacccattaggttaaatgattttctgggactattggaatgtgttaaaaagaatattcctctaacagatattccgacaaaggattgattactataaatggagaatgttcctaatgtatactttaatcctgtgtttatagagcccacgtttaaacattctttattaagtgtttataaacacagattaatagttttatttgaagtattcgttgtattcattctaatatatgtattttttagatctgaattaaatatgttcttcatgcctaaacgaaaaatacccgatcctattgatagattacgacgtgctaatctagcgtgtgaagacgataaattaatgatctatggattaccatggatgacaactcaaacatctgcgttatcaataaatagtaaaccgatagtgtataaagattgtgcaaagcttttgcgatcaataaatggatcacaaccagtatctcttaacgatgttcttcgcagatgatgattcattttttaagtatttggctagtcaagatgatgaatcttcattatctgatatattgcaaatcactcaatatctagactttctgttattattattgatccaatcaaaaaataaattagaagctgtgggtcattgttatgaatctctttcagaggaatacagacaattgacaaaattcacagactttcaagattttaaaaaactgtttaacaaggtccctattgttacagatggaagggtcaaacttaataaaggatatttgttcgactttgtgattagtttgatgcgattcaaaaaagaatcctctctagctaccaccgcaatagatcctgttagatacatagatcctcgtcgcaatatcgcattttctaacgtgatggatatattaaagtcgaataaagtgaacaataattaattctttattgtcatcatgaacggcggacatattcagttgataatcggccccatgttttcaggtaaaagtacagaattaattagacgagttagacgttatcaaatagctcaatataaatgcgtgactataaaatattctaacgataatagatacggaacgggactatggacgcatgataagaataattttgaagcattggaagcaactaaactatgtgatgtcttggaatcaattacagatttctccgtgataggtatcgatgaaggacagttctttccagacattgtttaattctgtgagcgtatggcaaacggtaccgagctcggtttggaattagtgaaagcttaaaaattgaaattttattttttttttttggaatataaataagctcgaagtcgaccaccatgagtgctcctaaactcctctctctgggctgtatcttcttccccttgctactttttcagcaggcccgggctcaattcccaagacagtgtgccactgttgaggctttgagaagtggtatgtgttgcccagacctgtcccctgtgtctgggcctgggacagaccgctgtggctcatcatcagggaggggcagatgtgaggcagtgactgcagactcccggccccacagccctcagtatccccatgatggcagagatgatcgggaggtctggcccttgcgcttcttcaataggacatgtcactgcaacggcaatttctcaggacacaactgtgggacgtgccgtcctggctggagaggagctgcctgtgaccagagggttctcatagtcaggagaaatcttctggacttaagtaaagaagaaaagaaccactttgtccgggccctggatatggcaaagcgcacaactcaccctttatttgtcattgccaccaggagatcagaagaaatactggggccagatggcaacacgccacaatttgagaacatttccatttataactactttgtttggacacactattactcagtcaaaaagactttccttggggtaggacaggaaagctttggtgaagtggatttctctcatgagggaccagcttttctcacatggcacaggtaccacctcctgcgtctggagaaagacatgcaggaaatgttgcaagagccttctttctcccttccttactggaattttgcaacggggaaaaatgtctgtgatatctgcacggatgacttgatgggatccagaagcaactttgattccactctaataagcccaaactctgtcttttctcaatggcgagtggtctgtgactccttggaagattatgataccctgggaacactttgtaacagcaccgaggatgggccaattaggagaaatccagctggaaatgtggccagaccaatggtgcaacgtcttcctgaaccacaggatgtcgctcagtgcttggaagttggtttatttgacacgcctcctttttattccaactctacaaacagtttccgaaacacagtggaaggttacagtgaccccacgggaaagtatgaccctgctgttcgaagtcttcacaatttggctcatctattcctgaatggaacagggggacaaacccatttgtctccaaatgatcctatttttgtcctcctgcacaccttcacagatgcagtctttgatgaatggctgaggagatacaatgctgatatatccacatttccattggaaaatgcccctattggacataatagacaatacaacatggtgccattctggcccccagtcaccaacacagaaatgtttgttactgctccagacaacctgggatacacttatgaaattcaatggccaagtcgggagtttagtgtacctgagataattgccatagcagtagttggcgctttgttactggttgcactcatttttgggactgcttcttatctgattcgtgccagacgcagtatggatgaagctaaccagcctctcctcactgatcagtatcaatgctatgctgaagaatatgaaaaactccagaatcctaatcagtctgtggtctaattaattaatttttatcgatctaattcaacaatgtctggagagctcggtttggaattagtgaaagcttaaaaattgaaattttattttttttttttggaatataaataagctcgaagtcgaccaccatgttcttggctgttttgtattgccttctgtggagtttccagatctctgatggccattttcctcgagcctgtgcctcctctaagaacttgttggcaaaagaatgctgcccaccatggatgggtgatgggagtccctgcggccagctttcaggcagaggttcctgccaggatatccttctgtccagtgcaccatctggacctcagttccccttcaaaggggtggatgaccgtgagtcctggccctctgtgttttataataggacctgccagtgctcaggcaacttcatgggtttcaactgcggaaactgtaagtttggatttgggggcccaaattgtacagagaagcgagtcttgattagaagaaacatttttgatttgagtgtctccgaaaagaataagttcttttcttacctcactttagcaaaacatactatcagctcagtctatgtcatccccacaggcacctatggccaaatgaacaatgggtcaacacccatgtttaatgatatcaacatctacgacctctttgtatggatgcattactatgtgtcaagggacacactgcttgggggctctgaaatatggagggacattgattttgcccatgaagcaccagggtttctgccttggcacagacttttcttgttattgtgggaacaagaaattcgagaactaactggggatgagaacttcactgttccatactgggattggagagatgcagaaaactgtgacatttgcacagatgagtacttgggaggtcgtcaccctgaaaatcctaacttactcagcccagcatccttcttctcctcctggcagatcatttgtagcagatcagaagagtataatagccatcaggttttatgcgatggaacacctgagggaccactattacgtaatcctggaaaccatgacaaagccaaaacccccaggctcccatcttcagcagatgtggaattttgtctgagtttgacccagtatgaatctggatcaatggatagaactgccaatttcagctttagaaacacactggaaggatttgccagtccactcacagggatagcagatccttctcaaagtagcatgcacaatgccttacatatctttatgaatggaacaatgtcccaagtacagggatcggccaacgatcccatttttcttcttcaccatgcttttgtggacagtatttttgaacaatggctgcgaaggcaccgccctcttttggaagtttacccagaagccaatgcacctatcggccataacagagactcttacatggttcctttcataccgctctatagaaatggtgatttcttcataacatccaaggatctgggatatgactacagctacctccaagagtcagatccaggcttttacagaaattatattgagccttacttggaacaagccagtcgtatctggccatggcttcttggggcagcactggtgggagctgttattgctgcagctctctctgggcttagcagtaggctatgccttcagaagaagaagaagaagaagcaaccccaggaggaaaggcagccactcctcatggacaaagacgactaccacagcttgctgtatcagagccatctgtgattaattaatttttatcgatctaattcaacaatgtctggagagctcgatccttctgtgagcgtatggcaaacgaaggaaaaatagttatagtagccgcactcgatgggacatttcaacgtaaaccgtttaataatattttgaatcttattccattatctgaaatggtggtaaaactaactgctgtgtgtatgaaatgctttaaggaggcttccttttctaaacgattgggtgaggaaaccgagataaaccgagatagaaataataggaggtaatgatatgtatcaatcggtgtgtagaaagtgttacatcgactcataatattatattttttatctaaaaaactaaaaataaacattgattaaattttaatataatacttaaaaatggatgttgtgtcgttagataaaccgtttatgtattttgaggaaattgataatgagttagattacgaaccagaaagtgcaaatgaggtcgcaaaaaaactgccgtatcaaggacagttaaaactattactaggagaattattttttcttagtaagttacagcgacacggtatattagatggtgccaccgtagtgtatataggatctgctcccggtacacatatacgttatttgagagatcatttctataatttaggagtgatcatcaaatggatgctaattgacggccgccatcatgatcctattttaaatggattgcgtgatgtgactctagtgactcggttcgttgatgaggaatatctacgatccatcaaaaaacaactgcatccttctaagattattttaatttctgatgtgagatccaaacgaggaggaaatgaacctagtacggcggatttactaagtaattacgctctacaaaatgtcatgattagtattttaaaccccgtggcgtctagtcttaaatggagatgcccgtttccagatcaatggatcaaggacttttatatcccacacggtaataaaatgttacaaccttttgctccttcatattcagctgaaatgagattattaagtatttataccggtgagaacatgagactgactcgagttaccaaattagacgctgtaaattatgaaaaaaagatgtactaccttaataagatcgtccgtaacaaagtagttgttaactttgattatcctaatcaggaatatgactattttcacatgtactttatgctgaggaccgtgtactgcaataaaacatttcctactactaaagcaaaggtactatttctacaacaatctatatttcgtttcttaaatattccaacaacatcaactgaaaaagttagtcatgaaccaatacaacgtaaaatatctagcaaaaattctatgtctaaaaacagaaatagcaagagatccgtacgcggtaataaatagaaacgtactactgagatatactaccgatatagagtataatgatttagttactttaataaccgttagacataaaattgattctatgaaaactgtgtttcaggtatttaacgaatcatccataaattatactccggttgatgatgattatggagaaccaatcattataacatcgtatcttcaaaaaggtcataacaagtttcctgtaaattttctatacatagatgtggtaatatctgacttatttcctagctttgttagactagatactacagaaactaatatagttaatagtgtactacaaacaggcgatggtaaaaagactcttcgtcttcccaaaatgttagagacggaaatagttgtcaagattctctatcgccctaatataccattaaaaattgttagatttttccgcaataacatggtaactggagtagagatagccgatagatctgttatttcagtcgctgattaatcaattagtagagatgagataagaacattataataatcaataatatatcttatatcttatatcttatatcttatatcttgtttagaaaaatgctaatattaaaatagctaacgctagtaatccaatcggaagccatttgatatctataatagggtatctaatttcctgatttaaatagcggacagctatattctcggtagctactcgtttggaatcacaaacattatttacatctaatttactatctgtaatggaaacgtttcccaatgaaatggtacaatccgatacattgcattttgttatatttttttttaaagaggctggtaacaacgcatcgcttcgtttacatggctcgtaccaacaataatagggtaatcttgtatctattcctatccgtactatgcttttatcaggataaatacatttacatcgtatatcgtctttgttagcatcacagaatgcataaatttgttcgtccgtcatgataaaaatttaaagtgtaaatataactattatttttatagttgtaataaaaagggaaatttgattgtatactttcggttctttaaaagaaactgacttgataaaaatggctgtaatctctaaggttacgtatagtctatatgatcaaaaagagattaatgctacagatattatcattagtcatgttaaaaatgacgacgatatcggtaccgttaaagatggtagactaggtgctatggatggggcattatgtaagacttgtgggaaaacggaattggaatgtttcggtcactggggtaaagtaagtatttataaaactcatatagttaagcctgaatttatttcagaaattattcgtttactgaatcatatatgtattcactgcggattattgcgttcacgagaaccgtattccgacgatattaacctaaaagagttatcgggacacgctcttaggagattaaaggataaaatattatccaagaaaaagtcatgttggaacagtgaatgtatgcaaccgtatcaaaaaattactttttcaaagaaaaaggtttgtttcgtcaacaagttggatgatattaacgttcctaattctctcatctatcaaaagttaatttctattcatgaaaagttttggccattattagaaattcatcaatatccagctaacttattttatacagactactttcccatccctccgttgattattagaccggctattagtttttggatagatagtatacccaaagagaccaatgaattaacttacttattaggtatgatcgttaagaattgtaacttgaatgctgatgaacaggttatccagaaggcggtaatagaatacgatgatattaaaattatttctaataacactaccagtatcaatttatcatatattacatccggcaaaaataatatgattagaagttatatcgtcgcccgacgaaaagatcagaccgctagatctgtaattggtcccagtacatctatcaccgttaatgaggtaggaatgcccgcatatattagaaatacacttacagaaaagatatttgttaatgcctttacagtggataaagttaaacaactattagcgtcaaaccaagttaaattttactttaataaacgattaaaccaattaacaagaatacgccaaggaaagtttattaaaaataaaatacatttattgcctggtgattgggtagaagtagctgttcaagaatatacaagtattatttttggaagacagccgtctctacatagatacaacgtcatcgcttcatctatcagagctaccgaaggagatactatcaaaatatctcccggaattgccaactctcaaaatgctgatttcgacggggatgaggaatggatgatattagaacaaaatcctaaagctgtaattgaacaaagtattcttatgtatccgacgacgttactcaaacacgatattcatggagcccccgtttatggatctattcaagatgaaatcgtagcagcgtattcattgtttaggatacaagatctttgtttagatgaagtattgaacatcttggggaaatatggaagagagttcgatcctaaaggtaaatgtaaattcagcggtaaagatatctatacttacttgataggtgaaaagattaattatccgggtctcttaaaggatggtgaaattattgcaaacgacgtagatagtaattttgttgtggctatgaggcatctgtcattggctggactcttatccgatcataagtcgaacgtggaaggtatcaactttattatcaagtcatcttatgtttttaagagatatctatctatttacggttttggggtgacattcaaagatctgagaccaaattcgacgttcactaataaattggaggccatcaacgtagaaaaaatagaacttatcaaagaagcatacgccaaatatctcaacgatgtaagagacgggaaaatagttccattatctaaagctttagaggcggactatgtggaatccatgttatccaacttgacaaatcttaatatccgagagatagaagaacatatgagacaaacgctgatagatgatccagataataacctcctgaaaatggccaaagcgggttataaagtaaatcccacagaactaatgtatattctaggtacgtatggacaacaaaggattgatggtgaaccagcagagactcgagtattgggtagagttttaccttactatcttccagactctaaggatccagaaggaagaggttacattcttaattctttaacaaaaggattaacgggttctcaatattacttttcgatgctggttgccagatctcaatctactgatatcgtctgtgaaacatcacgtaccggaacactggctagaaaaatcattaaaaagatggaggatatggtggtcgacggatacggacaagtagttataggtaatacgctcatcaagtacgccgccaattataccaaaattctaggctcagtatgtaaacctgtagatcttatctatccagatgagtccatgacttggtatttggaaattagtgctctgtggaataaaataaaacagggattcgtttactctcagaaacagaaacttgcaaagaagacattggcgccgtttaatttcctagtattcgtcaaacccaccactgaggataatgctattaaggttaaggatctgtacgatatgattcataacgtcattgatgatgtgagagagaaatacttctttacggtatctaatatagattttatggagtatatattcttgacgcatcttaatccttctagaattagaattacaaaagaaacggctatcactatctttgaaaagttctatgaaaaactcaattatactctaggtggtggaactcctattggaattatttctgcacaggtattgtctgagaagtttacacaacaagccctgtccagttttcacactactgaaaaaagtggtgccgtcaaacaaaaacttggtttcaacgagtttaataacttgactaatttgagtaagaataagaccgaaattatcactctggtatccgatgatatctctaaacttcaatctgttaagattaatttcgaatttgtatgtttgggagaattaaatccaaacatcactcttcgaaaagaaacagataaatatgtagtagatataatagtcaatagattatacatcaagagagcagaaataaccgaattagtcgtcgaatatatgattgaacgatttatctcctttagcgtcattgtaaaggaatggggtatggagacattcattgaggacgaggataatattagatttactgtctacctaaatttcgttgaaccggaagaattgaatcttagtaagtttatgatggttcttccgggggcagccaacaagggaaagattagtaaattcaagattcctatctctgattatacgggatatgacgacttcaatcaaacaaaaaagctcaataagatgactgtagaactcatgaatctaaaagaattgggttctttcgatttggaaaacgtcaacgtgtatcctggagtatggaatacatacgatatcttcggtatcgaggccgctcgtgaatacttgtgcgaagccatgttaaacacctatggagaagggttcgattatctgtatcagccttgtgatcttctcgctagtttactatgtgctagttacgaaccagaatcagtgaataaattcaagttcggcgcagctagtactcttaagagagctacgttcggagacaataaagcattgttaaacgcggctcttcataaaaagtcagaacctattaacgataatagtagctgccacttttttagcaaggtccctaatataggaactggatattacaaatactttatcgacttgggtcttctcatgagaatggaaaggaaactatctgataagatatcttctcaaaagatcaaggaaatggaagaaacagaagacttttaattcttatcaataacatatttttctatgatctgtcttttaaacgatggattttccacaaatgcgcctctcaagtccctcatagaatgatacacgtataaaaaatatagcataggcaatgactccttatttttagacattagatatgccaaaatcatagccccgcttctatttactcccgcagcacaatgaaccaacacgggctcgtttcgttgatcacatttagataaaaaggcggttacgtcgtcaaaatatttactaatatcggtagttgtatcatctaccaacggtatatgaataatattaatattagagttaggtaatgtatatttatccatcgtcaaatttaaaacatatttgaacttaacttcagatgatggtgcatccatagcatttttataatttcccaaatacacattattggttacccttgtcattatagtgggagatttggctttgtgcatatctccagttgaacgtagtagtaagtatttatacaaacttttcttatccatttataacgtacaaatggataaaactactttatcggtaaacgcgtgtaatttagaatacgttagagaaaaggctatagtaggcgtacaagcagccaaaacatcaacacttatattctttgttattatattggcaattagtgcgctattactctggtttcagacgtctgataatccagtctttaatgaattaacgagatatatgcgaattaaaaatacggttaacgattggaaatcattaacggatagcaaaacaaaattagaaagtgatagaggtagacttctagccgctggtaaggatgatatatttgaattcaaatgtgtggatttcggcgcctattttatagctatgcgattggataagaaaacatatctgccgcaagctattaggcgaggtactggagacgcgtggatggttaaaaaggcggcaaaggtcgatccatctgctcaacaattttgtcagtatttgataaaacacaagtctaataatgttattacttgtggtaatgagatgttaaatgaattaggttatagcggttattttatgtcaccgcattggtgttccgattttagtaatatggaatagtgttagataaatgcggtaacgaatgttcctgtaaggaaccataacagcttagatttaacgttaaagatgagcataaacataataaacaaaattacaatcaaacttataacattaatatcaaacaatccaaaaaatgaaatcagtggagtagtaaacgcgtacataactcctggataacgtttagcagctgccgttcctattctagaccaaaaattcggtttcatgttttcgaaacggtattctgcaacaagtcgaggatcgtgttctacatatttggcggcattatccagtatctgcctattgatcttcatttcgttttcgattctggctatttcaaaataaaatcccgatgatagacctccagactttataatttcatctacgatgttcagcgccgtagtaactctaataatataggctgataagctaacatcataccctcctgtatatgtgaatatggcatgatttttgtccattacaagctcggttttaactttattgcctgtaataatttctctcatctgtaggatatctatttttttgtcatgcattgccttcaagacgggacgaagaaacgtaatatcctcaataacgttatcgttttctacaataactacatattctacctttttattttctaactcggtaaaaaaattagaatcccatagggctaaatgtctagcgatatttcttttcgtttcctctgtacacatagtgttacaaaaccctgaaaagaagtgagtatacttgtcatcatttctaatgtttcctccagtccactgtataaacgcataatccttgtaatgatctggatcatccttgactaccacaacatttcttttttctggcataacttcgttgtcctttacatcatcgaacttctgatcattaatatgctcatgaacattaggaaatgtttctgatggaggtctatcaataactggcacaacaataacaggagttttcaccgccgccatttagttattgaaattaatcatatacaactctttaatacgagttatattttcgtctatccattgtttcacattgacatatttcgacaaaaagatataaaatgcgtattccaatgcttctctgtttaatgaattactaaaatatacaaacacgtcactgtctggcaataaatgatatcttagaatattgtaacaatttattttgtattgcacatgttcgtgatctatgagttcttcttcgaatggcataggatctccgaatctgaaaacgtataaataggagttagaataataatatttgagagtattggtaatatataaactctttagcggtataattagtttttttctctcaatttctatttttagatgtgatggaaaaatgactaattttgtagcattagtatcatgaactctaatcaaaatcttaatatcttcgtcacacgttagctctttgaagtttttaagagatgcatcagttggttctacagatggagtaggtgcaacaattttttgttctacacatgtatgtactggagccattgttttaactataatggtgcttgtatcgaaaaactttaatgcagatagcggaagctcttcgccgcgactttctacgtcgtaattgggttctaacgccgatctctgaatggatactagttttctaagttctaatgtgattctctgaaaatgtaaatccaattcctccggcattatagatgtgtatacatcggtaaataaaactatagtatccaacgatcccttctcgcaaattctagtcttaaccaaaaaatcgtatataaccacggagatggcgtatttaagagtggattcttctaccgttttgttcttggatgtcatataggaaactataaagtccgcactactgttaagaatgattactaacgcaactatatagtttaaattaagcattttggaaacataaaataactctgtagacgatacttgactttcgaataagtttgcagacaaacgaagaaagaacagacctctcttaatttcagaagaaaactttttttcgtattcctgacgtctagagtttatatcaataagaaagttaagaattagtcggttaatgttgtatttcattacccaagtttgagatttcataatattatcaaaagacatgataatattaaagataaagcgctgactatgaacgaaatagctatatggttcgctcaagaatatagtcttgttaaacgtggaaacgataactgtatttttaatcacgtcagcggcatctaaattaaatataggtatatttattccacacactctacaatatgccacaccatcttcataataaataaattcgttagcaaaattattaattttagtgaaatagttagcgtcaactttcatagcttccttcaatctaatttgatgctcacacggtgcgaattccactctaacatcccttttccatgcctcaggttcatcgatctctataatatctagttttttgcgtttcacaaacacaggctcgtctctcgcgatgagatctgtatagtaactatgtaaatgataactagatagaaagatgtagctatatagatgacgatcctttaagagaggtataataactttaccccaatcagatagactgttgttatggtcttcggaaaaagaatttttataaatttttccagtattttccaaatatacgtacttaacatctaaaaaatccttaatgataataggaatggataatccgtctattttataaagaaatacatatcgcacattatacttttttttggaaatgggaataccgatgtgtctacataaatatgcaaagtctaaatattttttagagaatcttagttggtccaaattcttttccaagtacggtaatagatttttcatattgaacggtatcttcttaatctctggttctagttccgcattaaatgatgaaactaagtcactatttttataactaacgattacatcacctctaacatcatcatttaccagaatactgatcttcttttgtcgtaaatacatgtctaatgtgttaaaaaaaagatcatacaagttatacgtcatttcatctgtggtattcttgtcattgaaggataaactcgtactaatctcttctttaacagcctgttcaaatttatatcctatatacgaaaaaatagcaaccagtgtttgatcatccgcgtcaatattctgttctatcgtagtgtataacaatcgtatatcttcttctgtgatagtcgatacgttataaaggttgataacgaaaatatttttatttcgtgaaataaagtcatcgtaggattttggacttatattcgcgtctagtagatatgcttttatttttggaatgatctcaattagaatagtctctttagagtccatttaaagttacaaacaactaggaaattggtttatgatgtataatttttttagtttttatagattctttattctatacttaaaaaatgaaaataaatacaaaggttcttgagggttgtgttaaattgaaagcgagaaataatcataaattatttcattatcgcgatatccgttaagtttgtatcgtaatggcgtggtcaattacgaataaagcggatactagtagcttcacaaagatggctgaaatcagagctcatctaaaaaatagcgctgaaaataaagataaaaacgaggatattttcccggaagatgtaataattccatctactaagcccaaaaccaaacgagccactactcctcgtaaaccagcggctactaaaagatcaaccaaaaaggaggaagtggaagaagaagtagttatagaggaatatcatcaaacaactgaaaaaaattctccatctcctggagtcagcgacattgtagaaagcgtggccgctgtagagctcgatgatagcgacggggatgatgaacctatggtacaagttgaagctggtaaagtaaatcatagtgctagaagcgatctctctgacctaaaggtggctaccgacaatatcgttaaagatcttaagaaaattattactagaatctctgcagtatcgacggttctagaggatgttcaagcagctggtatctctagacaatttacttctatgactaaagctattacaacactatctgatctagtcaccgagggaaaatctaaagttgttcgtaaaaaagttaaaacttgtaagaagtaaatgcgtgcacttttttataaagatggtaaactctttaccgataataattttttaaatcctgtatcagacgataatccagcgtatgaggttttgcaacatgttaaaattcctactcatttaacagatgtagtagtatatgaacaaacgtgggaggaggcgttaactagattaatttttgtgggaagtgattcaaaaggacgtagacaatacttttacggaaaaatgcatgtacagaatcgcaacgctaaaagagatcgtatttttgttagagtatataacgttatgaaacgaattaattgttttataaacaaaaatataaagaaatcgtccacagattccaattatcagttggcggtttttatgttaatggaaactatgttttttattagatttggtaaaatgaaatatcttaaggagaatgaaacagtagggttattaacactaaaaaataaacacatagaaataagtcccgatgaaatagttatcaagtttgtaggaaaggacaaagtttcacatgaatttgttgttcataagtctaatagactatataaaccgctattgaaactgacggatgattctagtcccgaagaatttctgttcaacaaactaagtgaacgaaaggtatacgaatgtatcaaacagtttggtattagaatcaaggatctccgaacgtatggagtcaattatacgtttttatataatttttggacaaatgtaaagtccatatctcctcttccgtcaccaaaaaagttaatagcattaactatcaaacaaactgctgaagtggtaggtcatactccatcaatttcaaaaagagcttatatggcaacgactattttagaaatggtaaaggataaaaattttttagatgtagtatctaaaactacgttcgatgaattcctatctatagtcgtagatcacgttaaatcatctacggatggatgatatagatctttacacaaataattacaagaccgataaatggaaatggataagcgtatgaaatctctcgcaatgacagctttcttcggagagctaagcacattagatattatggcattgataatgtctatatttaaacgccatccaaacaataccattttttcagtggataaggatggtcagtttatgattgatttcgaatacgataattataaggcttctcaatatttggatctgaccctcactccgatatctggagatgaatgcaagactcacgcatcgagtatagccgaacaattggcgtgtgcggatattattaaagaggatattagcgaatatatcaaaactactccccgtcttaaacgatttataaaaaaataccgcaatagatcagatactcgtatcagtcgagatacagaaaagcttaaaatagctctagctaaaggcatagattacgaatatataaaagacgcttgttaataagtaaatgaaaaaaaactagtcgtttataataaaacacgatatggatgccaacgtagtatcattttctactattgcgacgtatatagacgctttagcgaagaatgcttcggaattagaacagaggtctaccgcatacgaaataaataatgaattggaactagtatttattaagccgccattgattactttgacaaatgtagtgaatatctctacgattcaggaatcgtttattcgatttaccgttactaataaggaaggtgttaaaattagaactaagattccattatctaaggtacatggtctagatgtaaaaaatgtacagttagtagatgctatagataacatagtttgggaaaagaaatcattagtgacggaaaatcgtcttcacaaagaatgcttgttgagactatcgacagaggaacgtcatatatttttggattacaagaaatatggatcctctatccgactagaattagtcaatcttattcaagcaaaaacaaaaaactttacgatagactttaagctaaaatattttctaggatccggtgcccagtctaaaagttctttgttgcacgctattaatcatccaaagtcaaggcctaatacatctctggaaatagaattcacacctagagacaatgaaacagttccatatgatgaactaataaaggaattgacgactctctcgcgtcatatatttatggcttctccagagaatgtaattctttctccgcctattaacgcgcctataaaaacctttatgttgcctaaacaagatatagtaggtttggatctggaaaatctatatgccgtaactaagactgacggcattcctataactatcagagttacatcaaacgggttgtattgttattttacacatcttggttatattattagatatcctgttaagagaataatagattccgaagtagtagtctttggtgaggcagttaaggataagaactggaccgtatatctcattaagctaatagagcctgtgaatgcaatcaatgatagactagaagaaagtaagtatgttgaatctaaactagtggatatttgtgatcggatagtattcaagtcaaagaaatacgaaggtccgtttactacaactagtgaagtcgtcgatatgttatctacatatttaccaaagcaaccagaaggtgttattctgttctattcaaagggacctaaatctaacattgattttaaaattaaaaaggaaaatactatagaccaaactgcaaatgtagtatttaggtacatgtccagtgaaccaattatctttggagaatcgtctatctttgtagagtataagaaatttagcaacgataaaggctttcctaaagaatatggttctggtaagattgtgttatataacggcgttaattatctaaataatatctattgtttggaatatattaatacacataatgaagtgggtattaagtccgtggttgtacctattaagtttatagcagaattcttagttaatggagaaatacttaaacctagaattgataaaaccatgaaatatattaactcagaagattattatggaaatcaacataatatcatagtcgaacatttaagagatcaaagcatcaaaataggagatatctttaacgaggataaactatcggatgtgggacatcaatacgccaataatgataaatttagattaaatccagaagttagttattttacgaataaacgaactagaggaccgttgggaattttatcaaactacgtcaagactcttcttatttctatgtattgttccaaaacatttttagacgattccaacaaacgaaaggtattggcgattgattttggaaacggtgctgacctggaaaaatacttttatggagagattgcgttattggtagcgacggatccggatgctgatgctatagctagaggaaatgaaagatacaacaaattaaactctggaattaaaaccaagtactacaaatttgactacattcaggaaactattcgatccgatacatttgtctctagtgtcagagaagtattctattttggaaagtttaatatcatcgactggcagtttgctatccattattcttttcatccgagacattatgctaccgtcatgaataacttatccgaactaactgcttctggaggcaaggtattaatcactaccatggacggagacaaattatcaaaattaacagataaaaagacttttataattcataagaatttacctagtagcgaaaactatatgtctgtagaaaaaatagctgatgatagaatagtggtatataatccatcaacaatgtctactccaatgactgaatacattatcaaaaagaacgatatagtcagagtgtttaacgaatacggatttgttcttgtagataacgttgatttcgctacaattatagaacgaagtaaaaagtttattaatggcgcatctacaatggaagatagaccgtctacaaaaaactttttcgaactaaatagaggagccattaaatgtgaaggtttagatgtcgaagacttacttagttactatgttgtttatgtcttttctaagcggtaaataataatatggtatgggttctgatctcccagttctaaatgcattaaataattccaatagagcgatttttgttcctataggaccttccaactgtggatactctgtattgttaatagatatattaatacttttgtcgggtaacagaggttctacgtcttctaaaaataaaagttttataacatctggcctgttcataaataaaaacttggcgattctatatatactcttattatcaaatctagccattgtcttatagatgtgagctactgtaggtgtaccatttgattttctttctaatactatatatttctctcgaagaagttcttgcacatcatctgggaataaaatactactgttgagtaaatcagttattttttttatatcgatattgatggacatttttatagttaaggataataagtatcccaaagtcgataacgacgataacgaagtatttatacttttaggaaatcacaatgactttatcagattaaaattaacaaaattaaaggagcatgtatttttttctgaatatattgtgactccagatacatatggatctttatgcgtcgaattaaatgggtctagttttcagcacggcggtagatatatagaggtggaggaatttatagatgctggaagacaagttagatggtgttctacatccaatcatatatctaaagatatacccgaagatatgcacactgataaatttgtcatttatgatatttatacgtttgattcgttcaagaataaacgattggtattcgtacaggtacctccgtcgttaggagatgatagtcatttgactaatccgttattgtcaccgtattatcgtaattcagtagccagacaaatggtcaatgatatgatttttaatcaagattcatttttaaaatatttattagaacatctgattagaagccactatagagtttctaaacatataacaatagttagatacaaggataccgaagaattaaatctaacgagaatatgttataatagagataagtttaaggcgtttgtattcgcttggtttaacggcgtttcggaaaatgaaaaggtactagatacgtataaaaaggtatctaatttgatataatgaattcagtgactgtatcacacgcgccatatactattacttatcacgatgattgggaaccagtaatgagtcaattggtagagttttataacgaagtagccagttggctgctacgagacgagacgtcgcctattcctgataagttctttatacagttgaaacaaccgcttagaaataaacgagtatgtgtgtgtggtatagatccgtatccgaaagatggaactggtgtaccgttcgaatcaccaaattttacaaaaaaatcaattaaggagatagcttcatctatatctagattaaccggagtaattgattataaaggttataaccttaatataatagacggggttataccctggaattattacttaagttgtaaattaggagaaacaaaaagtcacgcgatttactgggataagatttccaagttactgctgcagcatataactaaacacgttagtgttctttattgtttgggtaaaacagatttctcgaatatacgggccaagttagaatccccggtaactaccatagtcggatatcatccagcggctagagaccgccaattcgagaaagatagatcatttgaaattatcaacgttttactggaattagacaacaaggcacctataaattgggctcaagggtttatttattaatgctttagtgaaattttaacttgtgttctaaatggatgcggctattagaggtaatgatgttatctttgttcttaagactataggtgtcccgtcagcgtgcagacaaaatgaagatccaagatttgtagaagcatttaaatgcgacgagttagaaagatatattgagaataatccagaatgtacactattcgaaagtcttagggatgaggaagcatactctatagtcagaattttcatggatgtagatttagacgcgtgtctagacgaaatagattatttaacggccattcaagattttattatcgaggtgtcaaactgtgtagctagattcgcgtttacagaatgcggcgccattcatgaaaatgtaataaaatccatgagatctaatttttcattgactaagtctacaaatagagataaaacaagttttcatattatctttttagatacgtataccactatggatacattgatagctatgaaacgaacactattagaattaagtagatcatctgaaaatccactaaccagatcgatagacactgccgtatataggagaaaaacaactcttcgggttgtaggtactaggaaaaatccaaattgcgacactattcatgtaatgcaaccaccgcatgataatatagaagattacctattcacttacgtggatatgaacaacaatagttattacttttctctacaacaacgattggaggatttagttcctgataagttatgggaaccagggtttatttcattcgaagacgctataaaaagagtttcaaaaatattcattaattctataataaactttaatgatctcgatgaaaataattttacaacggtaccactggtcatagattacgtaacaccttgtgcattatgtaaaaaacgatcgcataaacatccgcatcaactatcgttggaaaatggtgctattagaatttacaaaactggtaatccacatagttgtaaagttaaaattgttccgttggatggtaataaactgtttaatattgcacaaagaattttagacactaactctgttttattaaccgaacgaggagaccatatagtttggattaataattcatggaaatttaacagcgaagaacccttgataacaaaactaattttgtcaataagacatcaactacctaaggaatattcaagcgaattactctgtccaagaaaacgaaagactgtagaagctaacatacgagacatgttagtagattcagtggagaccgatacctatccggataaacttccgtttaaaaatggtgtattggacctggtagacggaatgttttactctggagatgatgctaaaaaatatacgtgtactgtatcaaccggatttaaatttgacgatacaaagttcgtcgaagacagtccagaaatggaagagttaatgaatatcattaacgatatccaaccattaacggatgaaaataagaaaaatagagagctatatgaaaaaacattatctagttgtttatgcggtgctaccaaaggatgtttaacattcttttttggagaaactgcaactggaaagtcgacaaccaaacgtttgttaaagtctgctatcggtgacctgtttgttgagacgggtcaaacaattttaacagatgtattggataaaggacctaatccatttatcgctaacatgcatttgaaaagatctgtattctgtagcgaactacctgattttgcctgtagtggatcaaagaaaattagatctgacaatattaaaaagttgacagaaccttgtgtcattggaagaccgtgtttctccaataaaattaataatagaaaccatgcgacaatcattatcgatactaattacaaacctgtttttgataggatagataacgcattaatgagaagaattgccgtcgtgcgattcagaacacacttttctcaaccttctggtagagaggctgctgaaaataatgacgcgtacgataaagtcaaactattagacgaggggttagatggtaaaatacaaaataatatatatagatttgcatttctatacttgttggtgaaatggtacaaaaaatatcatgttcctattatgaaactatatcctacacccgaagagattcctgactttgcattctatctcaaaataggtactctgttggtatctagctctgtaaagcatattccattaatgacggacctctccaaaaagggatatatattgtacgataatgtggtcactcttccgttgactactttccaacagaaaatatccaagtattttaattctagactatttggacacgatatagagagcttcatcaatagacataagaaatttgccaatgttagtgatgaatatctgcaatatatattcatagaggatatttcatctccgtaaatatatgctcatatatttatagaagatatcacatatctaaatgaataccggaatcatagatttatttgataatcatgttgatagtataccaactatattacctcatcagttagctactctagattatctagttagaactatcatagatgagaacagaagcgtgttattgttccatattatgggatcaggtaaaacaataatcgctttgttgttcgccttggtagcttccagatttaaaaaggtttacattctagtgccgaacatcaacatcttaaaaattttcaattataatatgggtgtagctatgaacttgtttaatgacgaattcatagctgagaatatctttattcattccacaacaagtttttattctcttaattataacgataacgtcattaattataacggattatctcgctacaataactctatttttatcgttgatgaggcacataatatctttgggaataatactggagaacttatgaccgtgataaaaaataaaaacaagattccttttttactattgtctggatctcccattactaacacacctaatactctgggtcatattatagatttaatgtccgaagagacgatagattttggtgaaattattagtcgtggtaagaaagtaattcagacacttcttaacgaacgcggtgtgaatgtacttaaggatttgcttaaaggaagaatatcatattacgaaatgcctgataaagatctaccaacgataagatatcacggacgtaagtttctagatactagagtagtatattgtcacatgtctaaacttcaagagagagattatatgattactagacgacagctatgttatcatgaaatgtttgataaaaatatgtataacgtgtcaatggcagtattgggacaacttaatctgatgaataatttagatactttatttcaggaacaggataaggaattgtacccaaatctgaaaataaataatggcgtgttatacggagaagaattggtaacgttaaacattagttccaaatttaaatactttattaatcggatacagacactcaacggaaaacattttatatacttttctaattctacatatggcggattggtaattaaatatatcatgctcagtaatggatattctgaatataatggttctcagggaactaatccacatatgataaacggcaaaccaaaaacatttgctatcgttactagtaaaatgaaatcgtctttagaggatctattagatgtgtataattctcctgaaaacgatgatggtagtcaattgatgtttttgttttcatcaaacattatgtccgaatcctatactctaaaagaggtaaggcatatttggtttatgactatcccagatactttttctcaatacaaccaaattcttggacgatctattagaaaattctcttacgccgatatttctgaaccagttaatgtatatcttttagccgccgtatattccgatttcaatgacgaagtgacgtcattaaacgattacacacaggatgaattaattaatgttttaccatttgacatcaaaaagctgttgtatctaaaatttaagacgaaagaaacgaatagaatatactctattcttcaagagatgtctgaaacgtattctcttccaccacatccatcaattgtaaaagttttattgggagaattggtcagacaatttttttataataattctcgtattaagtataacgataccaagttacttaaaatggttacatcagttataaaaaataaagaagacgctaggaattacatagatgatattgtaaacggtcacttctttgtatcgaataaagtatttgataaatctcttttatacaaatacgaaaacgatattattacagtaccgtttagactttcctacgaaccatttgtttggggagttaactttcgtaaagaatataacgtggtatcttctccataaaactgatgagatatataaagaaataaatgtcgagctttgttaccaatggatacctttccgttacattggaaccacacgagctgacgttagacataaaaactaatattaggaatgccgtatataagacgtatctccatagagaaattagtggtaaaatggccaagaaaatagaaattcgtgaagacgtggaattacctctcggcgaaatagttaataattctgtagttataaacgttccgtgtgtaataacctacgcgtattatcacgttggggatatagtcagaggaacattaaacatcgaagatgaatcaaatgtaactattcaatgtggagatttaatctgtaaactaagtagagattcgggtactgtatcatttagcgattcaaagtactgcttttttcgaaatggtaatgcgtatgacaatggcagcgaagtcactgccgttctaatggaggctcaacaaggtatcgaatctagttttgtttttctcgcgaatatcgtcgactcataaaaaagagaatagcggtaagtataaacacgaatactatggcaataattgcgaatgttttattctcttcgatatatttttgataatatgaaaaacatgtctctctcaaatcggacaaccatctcataaaatagttctcgcgcgctggagaggtagttgccgctcgtataatctctccagaataatatacttgcgtgtcgtcgttcaatttatacggatttctatagttctctgttatataatgcggtttgccctcatgattagacgacgacaatagtgttctaaatttagatagttgatcagaatgaatgtttattggcgttggaaaaattatccatacagcgtctgcagagtggttgatagttgttcctagatatgtaaaataatccaacttactaggcagcaaattgtctagataaaatactgaatcaaacggtgcagacgtattggcggatctaatggaatccaattgattaactatcttttgaaaatatacatttttatgatccaatacttgtaagaatatagaaataatgataagtccatcatcgtgtttttttgcctcttcataagaactatattttttcttattccaatgaacaagattaatctctccagagtatttgtacacatctatcaagtgattggatccataatcgtcttcctttccccaatatatatgtagtgatgataacacatattcattggggagaaaccctccacttatatatcctcctttaaaattaatccttactagttttccagtgttctggatagtggttggtttcgactcattataatgtatgtctaacggcttcaatcgcgcgttagaaattgcttttttagtttctatattaataggagatagttgttgcggcatagtaaaaatgaaatgataactgtttaaaaatagctcttagtatgggaattacaatggatgaggaagtgatatttgaaactcctagagaattaatatctattaaacgaataaaagatattccaagatcaaaagacacgcatgtgtttgctgcgtgtataacaagtgacggatatccgttaataggagctagaagaacttcattcgcgttccaggcgatattatctcaacaaaattcagattctatctttagagtatccactaaactattacggtttatgtactacaatgaactaagagaaatctttagacggttgagaaaaggttctatcaacaatatcgatcctcactttgaagagttaatattattgggtggtaaactagataaaaaggaatctattaaagattgtttaagaagagaattaaaagaggaaagtgatgaacgtataacagtaaaagaatttggaaatgtaattctaaaacttacaacacgggataaattatttaataaagtatatataagttattgcatggcgtgttttattaatcaatcgttggaggatttatcgcatactagtatttacaatgtagaaattagaaagattaaatcattaaatgattgtattaacgacgataaatacgaatatctgtcttatatttataatatgctagttaatagtaaatgaacttttacagatctagtataattagtcagattattaagtataatagacgactagctaagtctattatttgcgaggatgactctcaaattattacactcacggcattcgttaaccaatgcctatggtgtcataaacgagtatccgtgtccgctattttattaactactgataacaaaatattagtatgtaacagacgagatagttttctctattctgaaataattagaactagaaacatgtttagaaagaaacgattatttctgaattattccaattatttgaacaaacaggaaagaagtatactatcgtcatttttttctctagatccagctactactgataatgatagaatagacgctatttatccgggtggcatacccaaaaggggtgagaatgttccagagtgtttatccagggaaattaaagaagaagttaatatagacaattcttttgtattcatagacactcggttttttattcatggcatcatagaagataccattattaataaattttttgaggtaatcttctttgtcggaagaatatctctaacgagtgatcaaatcattgatacatttaaaagtaatcatgaaatcaaggatctaatatttttagatccgaattcaggtaatggactccaatacgaaattgcaaaatatgctctagatactgcaaaacttaaatgttacggccatagaggatgttattatgaatcattaaaaaaattaactgaggatgattgattaaaaaatataaattaatttaccatcgtgtatttttataacgggattgtccggcatatcatgtagatagttaccgtctacatcgtatactcgaccatctacgcctttaaatcctctatttattgacattaatctattagaattggaataccaaatattagtaccctcaattagtttattggtaatattttttttagacgatagatcgatggctcttgaaaccaaggttttccaaccggactcattgtcgatcggtgagaagtctttttcattagcatgaatccattctaatgatgtatgtttaaacactctaaacaattggacaaattcttttgatttgctttgaatgatttcaaataggtcttcgtctacagtaggcataccattagataatctagccattataaagtgcacgtttacatatctacgttctggaggagtaagaacgtgactattgagacgaatggctcttcctactatctgacgaagagacgcctcgttccatgtcatatctaaaatgaagatatcattaattgagaaaaaactaataccctcgcctccactagaagagaatacgcatgttttaatgcattctccgttagtgtttgattcttggttaaactcagccaccgccttgattctagtatcttttgttctagatgagaactctatattagagataccaaagactttgaaatatagtaataagatttctattcctgactgattaacaaatggttcaaagactagacatttaccatgggatgctaatattcccaaacatacatctataaatttgacgcttttctcttttaattcagtaaatagagagatatcagccgcactagcatcccctttcaatagttctccctttttaaaggtatctaatgcggatttagaaaactctctatctcttaatgaatttttaaaatcattatatagtgttgctatctcttgcgcgtattcgcccggatcacgattttgtctttcaggaaagctatcgaacgtaaacgtagtagccatacgtctcagaattctaaatgatgatatacctgtttttatttcagcgagtttagccttttgataaatttcttcttgctttttcgacatattaacgtatcgcattaatactgttttcttagcgaatgatgcagacccttctacgtcatcaaaaatagaaaactcgttattaactatatacgaacatagtcctcctagtttggagactaattctttttcatcgactagacgtttattctcaaatagcgattggtgttgtaaggatcctggtcgtagtaagttaaccaacatggtgaattcttgcacactattgacgataggtgtagccgataaacaaatcatcttatggttttttaacgcaatggtcttagataaaaaattatatactgaacgagtaggacggatcttaccatcttctttgattaatgatttagaaatgaagttatgacattcatcaataatgacgcatattctactcttggaattaatagttttgatattagtaaaaaatttatttctaaaattttgatcatcgtaattaataaaaatacaatccttcgttatctctggagcgtatctgagtatagtgttcatccaaggatcttctatcaaagcctttttcaccaataagataatagcccaattcgtataaatatccttaagatgtttgagaatatatacagtagtcattgttttaccgacacccgtttcatggaacaataaaagagaatgcatactgtctaatcctaagaaaactcttgctacaaaatgttgataatccttgaggcgtactacgtccgaccccatcatttcaacgggcatattagtagttctgcgtaaggcataatcgatataggccgcgtgtgatttactcatttatgagtgataagtaataactatgttttaaaaatcacagcagtagtttaactagtcttctctgatgtttgttttcgatactttttgaatcagaagtcatactagaataaagcaacgagtgaacgtaatagagagcttcgtatactctattcgaaaactctaagaacttattaatgaattccgtatccactggattgtttaaaatactaaattgaacactgttcacatccttccaagaagaagacttagtgacggacttaacatgagacataaataaatccaaattttttttacaaacatcactagccaccataatggcgctatctttcaaccagctatcgcttacgcattttagcagtctaacatttttaaagagactacaatatattctcatagtatcgattacacctctaccgaataaagttggaagtttaataatacaatatttttcgtttacaaaatcaaataatggtcgaaacacgtcgaaggttaacatcttataatcgctaatgtatagattgttttcagtgagatgattattagatttaatagcatctcgttcacgtttgaacagtttattgcgtgcgctgaggtcggcaactacggcgtccgctttagtactcctcccataatactttacgctattaatctttaaaatttcatagactttatctagatcgctttctggtaacatgatatcatgtgtaaaaagttttaacatgtcggtcggcattctatttagatcattaactctagaaatctgaagaaagtaattagctccgtattccagactaggtaatgggcttttacctagagacagattaagttctggcaatgtttcataaaatggaagaaggacatgcgttccctcccggatattttttacaatttcatccatttacaactctatagtttgttttcattattattagttattatctcccataatcttggtaatacttaccccttgatcgtaagataccttatacaggtcattacatacaactaccaattgtttttgtacataatagattggatggttgacatccatggtggaataaactactcgaacagatagtttatctttccccctagatacattagccgtaatagttgtcggcctaaagaatatctttggtgtaaagttaaaagttagggttcttgttccattattgctttttgtcagtagttcattataaattctcgagatgggtccgttctctgaatatagaacatcatttccaaatctaacttctagtctagaaataatatcggtcttattcttaaaatctattcccttgatgaagggatcgttaatgaacaaatccttggcctttgattcggctgatctattatctccgttatagacgttacgttgactagtccaaagacttacaggaatagatgtatcgatgatgttgatactatgtgatatgtgagcaaagattgttctcttagtggcatcactatatgttccagtaatggcggaaaactttttagaaatgttatatataaaagaattttttcgtgttccaaacattagcagattagtatgaagataaacactcatattatcaggaacattatcaatttttacatacacatcagcatcttgaatagaaacgataccatcttctggaacctctacgatctcggcagactccggataaccagtcggtgggccatcgctaacaataactagatcatccaacaatctactcacatatgcatctatataatctttttcatcttgtgagtaccctggatacgaaataaatttattatccgtatttccataataaggtttagtataaacagagagagatgttgccgcatgaacttcagttacagtcgccgttggttggtttatttgacctattactctcctaggtttctctataaacgatggtttaatttgtacattcttaaccatatatccaataaagctcaattcaggaacataaacaaattctttgttgaacgtttcaaagtcgaacgaagagtcacgaataacgatatcggatactggattgaaggttaccgttacggtaatttttgaatcggatagtttaagactgctgaatgtatcttccacatcaaacggagttttaatataaacgtatactgtagatggttctttaatagtgtcattaggagttaggccaatagaaatatcattaagttcactagaatatccagagtgtttcaaagcaattgtattattgatacaattattatataattcttcgccctcaatttcccaaataacaccgttacacgaagagatagatacgtgattaatacatttatatccaacatatggtacgtaactgaatcttcccatacctttaacttctggaagttccaaactcagaaccaaatgattaagcgcagtaatatactgatccctaatttcgaagctagcgatagcctgattgtctggaccatcgtttgtcataactccggatagagaaatatattgcggcatatacaaagttggaatttgactatcgactgcgaagacattagaccgtttaatagagtcatccccaccgatcaaagaattaatgatagtattattcattttctatttaaaatggaaaaagcttacaataaactccgtagagaaatatctataatttgtgagttttccttaaagtaacagcttccgtaaacgccgtctttatctcttagtaggtttattgtatttatgaccttttccttatcttcatagaatactaaaggcaacaaagaaatttttggttcttctctaagagctacgtgagacttaaccatagaagccaacgaatccctacatattttagaacagaaataccctacttcaccacccttgtatgtctcaatactaataggtctaaaaaccaaatcttgattacaaaaccaacacttatcaattacactatttgtcttaatagacacatctgccatagatttataatactttggtagtatacaagcgagtgcttcttctttagcgggcttaaagactgctttaggtgctgaaataaccacatctggaaggcttactcgcttagccatttaattacggaactatttttttatacttctaatgagcaagtagaaaacctctcatctacaaaaacgtactcgtgtccataatcctctaccatagttacacgttttttagatctcatatgtgctaaaaagttttcccatactaattggttactattatttttcgtataatttttaacagtttgaggttttagatttttagttacagaagtgatatcgaatattttatccaaaaagaatgaataattaattgtcttagaaggagtgttttcttggcaaaagaataccaagtgcttaaatatttctactacttcattaatcttttctgtactcagattcagtttctcatcttttacttgattgattatttcaaagactaacttataatcctttttatttattctctcgttagccttaagaaaactagatacaaaatttgcatctacatcatccgtggatatttgatttttttccatgatatccaagagttccgagataatttctccagaacattgatgagacaataatctccgcaatacatttctcaaatgaataagtttattagacacgtggaagtttgactttttttgtacctttgtacatttttgaaataccgactcgcaaaaaatacaatattcatatccttgttcagatactataccgttatgtctacaaccgctacataatcgtagattcatgttaacactctacgtatctcgtcgtccaatattttatataaaaacattttatttctagacgttgccagaaaatcctgtaatatttttagttttttgggctgtgaataaagtatcgccctaatattgttaccgtcttccgccaatatagtagttaaattatccgcacatgcagaagaacaccgcttaggcggattcagtacaatgttatatttttcgtaccaactcatttaaatatcataatctaaaatagttctgtaatatgtctagcgctaatatattgatcataatcctgtgcataaattaagatacaacaatgtctcgaaatcatcgacatggcttcttccatagttagaagatcgtcgtcaaagttagcaacgtgattcatcaacatttgctgttttgaggcagcaaatactgaaccgtcgccattcaaccattcataaaaaccatcgtctgaatccattgataatttcttgtactggtttttgagagctcgcatcaatctagcatttctagctcccggattgaaaacagaaagaggatcgtacatccagggtccattttctgtaaatagaatcgtataatgtcccttcaagaagatatcagacgatccacaatcaaagaattggtctccgagtttgtaacaaactgcggactttaacctatacatgataccgtttagcataatttctggtgatacgtcaatcggagtatcatctattagagatctaaagccggtgtaacattctccaccaaacatattcttattctgacgtcgttctacataaaacatcattgctccattaacgataacaggggaatgaacagcactacccatcacattagttcccaatggatcaatgtgtgtaactccagaacatcttccatagcctatgttaggaggagcgaacaccactcttccactattgccatcgaatgccatagaataaatatccttggaattgatagaaatcggactgtcggatgttgtgatcatcttcataggattaacaactatgtatggtgccgcctgaagtttcatatcgtaactgatgccgtttataggtctagccacagaaaccaacgtaggtctaaatccaactatagacaaaatagaagccaatatctgttcctcatctgtcataacttgagagcatccagtatgaataatcttcattagatggggatctaccgcatcatcatcgttacaataaaaaattcccattctaatgttcataattgcttttctaatcatggtatgcatgtttgctctctgaatctctgtggaaattagatctgatacacctgtaatcactatcggattatcctccgtaagacgattaaccaacaacatataattataagactttacttttctaaattcataaagttgctggattaggctataggtgtctccatgtacatacgcgttctcgagcgcaggaagtttaataccgaatagtgccatcagaataggatgaatatagtaattagtttctggttttctataaataaaagacaaatcttgtgaactagacatatcggtaaaatgcatggattggaatcgtgtagtcgacagaagaatatgatgattagatggagagtatattttatctaactctttgagttggtcaccgattctaggactagctcgagaatgaataagtactaaaggatgagtacatttcacagaaacactagcattgttcaatgtgctctttacatgggtaaggagttgaaatagctcgtttctatttgttctgacaatatttagtttattcataatgttaagcatatcctgaatagtaaagttagatgtgtcatacttgttagtagttagatatttagcaattgcattcccatcatttctcaatctcgtactccaatcatgcgtggatgctacttcgtcgatggaaaccatacaatcctttttgataggctgttgagattgatcatttcctgcacgtttaggtttggtacgttgatttctagcccctgcggatataaagtcatcgtctacaatttgggacaatgaattgcatacactacaagacaaagatttatcagaagtgtgaatatgatcttcatctaccaaagaaagagtttgattagtataactagattttagtcctgcgttagatgttaaaaaaacatcgctattgaccacggcttccattatttatattcgtagtttttactcgaaagcgtgattttaatatccaatcttattacttttggaatcgttcaaaacctttgactagttgtagaatttgatctattgccctacgcgtatactcccttgcatcatatacgttcgtcaccagatcgtttgtttcggcctgaagttggtgcatatctctttcaacattcgacatgagatccttaagggccatatcgtctagattttgttgagatgctgctcctggatttggattttgttgtgctgttgtacatactgtaccaccagtaggtgtaggagtacatacagtggccacaataggaggttgagaaagtgtaaccgttggagtagtacaagaaatacttccatccgattgttgtgtacatgtagttgttggtaacgtctgagaaggttgggtagatggcggcgtcgtcgttttttgatctttattaaatttagagataatatcctgaacagcattgctcggcgtcaacgctggaaggagtgaactcgccggcgcatcagtatcttcagacagccaatcaaaaagattagacatatcagatgatgtattagtttgttgtcgtggttttggtgtaggagcagtactactaggtagaagaataggagccgatgtagctgttggaaccggctgtggagttatatgaatagttggttgtagcggttggataggctgtctgctggcggccatcatattatctctagctagttgttctcgcaactgtctttgataatacgactcttgagactttagtcctatttcaatcgcttcatcctttttcgtatccggatccttttcttcagaataatagattgacgactttggtgtagaggattctgccagcctctgtgagaacttgttaaagaagtccatttaaggctttaaaattgaattgcgattataagattaaatggcagacacagacgatattatcgactatgaatccgatgatctcaccgaatacgaggatgatgaagaagaggaagaagatggagagtcactagaaactagtgatatagatcccaaatcttcttataagattgtagaatcagcatccactcatatagaagatgcgcattccaatcttaaacatatagggaatcatatatctgctcttaaacgacgctatactagacgtataagtctatttgaaatagcgggtataatagcagaaagctataacttgcttcaacgaggaagattacctctagtttcagaattttctgacgaaacgatgaagcaaaatatgctacatgtaattatacaagagatagaggagggttcttgtcctatagtcatcgaaaagaacggagaattgttgtcggtaaacgattttgacaaagatggtctaaaattccatctagactatattatcaaaatttggaaacttcaaaaacgatattagaatttatacgaatatcgttctctaaatgtcacaatcaagtctcgcatgttcagcaatttattgtcgtactttatatcgtgttcattaacgatatcttgcaaaatagtaatgattctatcttccttcgatagatattcttcagagattattgtcttatattctttcttgttatcagatatgaatttgataagactttgaacattattgatacccgtctgtttaattttttctacagatattttagttttggcagattctatcgtatctgtcaatagacatccaacatcgacattcgacgtcaattgtctataaatcaacgtataaattttagaaataacattagcgaattgttgtgcgttgatgtcgttattctgaaacagtatgattttaggtagcattttcttaacaaagagaacgtatttattgttactcagttgaacagatgatatatccagattactaacgcatctgattccgtataccaaactttcagaagaaatggtatacaattgtttgtattcattcaatgtctctttttcagaaattagtttagagtcgaatactgcaataattttcaagagatagttttcatcagataagattttatttagtgtagatatgataaaactattgttttgttggagaacttgatacgccgcgttctctgtagtcgacgctctcaaatgggaaacaatctccattatttttttggaatcggatactatatcttcggtatcttgacgcagtctagtatacatagagttaagagagattagagtttgtacattaagcaacatgtctctaaatgtggctacaaacttttcctttttcacatcatctagtttattatataccgatttcacaacggcaccagatttaaggaaccagaatgaaaaactctgataactacaatatttcatcatagttacgattttatcatcttctatagttggtgtaatagcgcatacctttttctccaagactggaaccaacgtcataaaaatgtttaaatcaaaatccatatcaacatctgatgcgctaagaccagtctcgcgttcaagattatctttactaatggtgacgaactcatcgtataaaactctaagtttgtccattatttatttacagatttagttgtttaatttatttgtgctcttccagagttgggatagtatttttctaacgtcggtattatattattaggatctacgttcatatgtatcataatattaatcatccacgttttgataaatctatctttagcttctgaaataacgtatttaaacaaaggagaaaaatatttagctacggcatcagacgcaataacattttttgtaaatgtaacgtatttagacgacagatcttcgttaaaaagttttccatctatgtagaatccatcggttgttaacaccattcccgcgtcagattgaataggagtttgaatagtttgttttggaaatagatccttcaataacttatagttgggtgggaaaaaatcgattttatcactagactctttcttttttactatcattacctcatgaactatttcttgaatgagtatatgtattttctttcctatatcggacgcgttcattggaaaatataccatgtcgttaactataagaatatttttatcctcgtttacaaactgaataatatcagatgtagttcgtaaacgaactatatcatcaccagcacaacatctaactatatgatatccactagtttcctttagccgtttattatcttgttccatattagcagtcattccatcatttaagaaggcgtcaaaaataatagggagaaatgacattttggattctgttacaactttaccaaaattaaggatatacggacttactatctttttctcaacgtcaatttgatgaacacacgatgaaaatgtgcttctatgagattgatcatgtagaaaacaacaagggatacaatatttccgcatatcatgaaatatattaagaaatcccaccttattatatttccccaaaggatccatgcacgtaaacattatgccgttatcattaataaagacttctttctcatcggatctgtaaaagttgttactgatttttttcattccaggatctagataattaataatgatgggttttctattcttattctttgtattttggcatatcctagaccagtaaacagtttccactttggtaaaatcagcagacttttgaacgctattaaacatggcattaatggcaataactaaaaatgtaaaatatttttctatgttaggaatatggtttttcactttaatagatatatggtttttggccaaaatgatagatatttttttatccgaggatagtaaaatattattagtcgccgtctctataaaaatgaagctagtctcgatatccaattttattctagaattgataggagtcgccaaatgtaccttatacgttatatctcccttgatgcgttccatttgtgtatctatatcggacacaagatctgtaaatagttttacgttattaatcatcacggtatcgccgtcgctagataacgctaatgtaccatccaagtcccaaatggagagatttaactgttcatcgtttagaataaaatgattaccggtcatattaataaagtgttcatcgtatctagataacaacgacttataattaatgtccaagtcttgaactcgctgaatgatcttttttaacccagttagttttagattggtacgaaatatattgttaaactttgattctacagtaatgtccaaatctagttgtggaaatacttccatcaacattgtttcaaacttgataatattattatctacatcttcgtacgatccaaattccggaatagatgtatcgcacgctctggccacccagataaccaaaaagtcacacgctccaggatatacattgtataaaaagctatcgttttttagtagggtttttttctgcgtgtatacgaagggattaaaaatagtattatcaacgtaactatattccaaattattcttatgagaatagataataatatcgtccttaatatctaacaaatttcctaaatatccctttaattgagtcattcgaagcgtcaatagaatatgtctcttaactatttccggctgttgtatatttaaatgacttcgtaaaaaataatatatgggcgacttctcatctatgtaatcatatggagtgagatatagggctcgttctacctcctgccccttacccacctgtaataccaattgcggacttactatatatcgcatatttatatcgtggggtaaagtgaaaatctactaccgatgatgtaagtcttacaatgttcgaaccagtaccagatcttaatttggaggcctccgtagaactaggggaggtaaatatagatcaaacaacacctatgataaaggagaatagcggttttatatcccgcagtagacgtctattcgcccatagatctaaggatgatgagagaaaactagcactacgattctttttacaaagactttattttttagatcatagagagattcattatttgttcagatgcgttgacgctgtaaaagacgtcactattaccaaaaaaaataacattatcgtggcgccttatatagcacttttaactatcgcatcaaaaggatgcaaacttacagaaacaatgattgaagcattctttccagaactatataatgaacatagtaagaaatttaaattcaactctcaagtatccatcatccaagaaaaactcggataccagtttggaaactatcacgtttatgattttgaaccgtattactctacagtagctctggctattcgagatgaacattcatctggcatttttaatatccgtcaagagagttatctggtaagttcattatctgaaataacatatagattttatctaattaatctaaaatctgatcttgttcaatggagtgctagtacgggcgctgtaattaatcaaatggtaaatactgtattgattacagtgtatgaaaagttacaactggtcatagaaaatgattcacaatttacatgttcattggctgtggaatcaaaacttccaataaaattacttaaagatagaaatgaattatttacaaaattcattaacgagttaaaaaagaccagttcattcaagataagcaaacgcgataaggatacgctactaaaatattttacttaggactggagttagaatttatagacgactcatttcgtttatcattgttactattattactattactatcattattagtgttggcattattagtattcttcttgtcatcttgttcagaaatatacagcaatgctatacctaatactaaatacattatcatgctcgcaatggctctaacaacaacgaaccaaaatgaatttggtcgtagcttttgttcacaaaaatacataaagaaatgtctacataaatctatggcgccattggctacttgaaatagcgccagtcctcctacagattttaatatagctgtataacatgacatttattcatcatcaaaagagacagagtcaccatctgtcatatttagattttttttcatgtgttcaaagtatcctctactcatttcattataatagtttatcatacttagaattttaggacggatcaatgagtaagacttgactagatcgtcagtagtaatttgtgcatcgtctattctgcatccgcttcgtcgaataatgtatagcatcgctttgagattctccatagctatcaagtctttatacaatgacatggaaatatctgtgaatactttatacttctccaacatcgatgccttaacatcatcgcctactttagcattgaaaatacgttctattgtgtagatggatgtagcaagatttttaaacaacaatgccatcttacacgatgattgcctcaagtctccaatcgtttgtttagaacgattagctacagagtccaatgcttggctgactagcatattattatctttagaaattgtattcttcaatgaggcgtttatcatatctgtgatttcgttagtcatattacagtctgactgggttgtaatgttatccaacatatcacctatggatacggtacacgtaccagcatttgtaataatcctatctaagatgttgtatggcattgcgcagaaaatatcttctcctgtaatatctccactctcgataaatctactcagattattcttaaatgccttattctctggagaaaagatatcagtgtccatcatttcattaatagtatacgcagaaaagataccacgagtatcaattctatccaagatacttatcggttccgagtcacagataatggtttcctctccttcgggagatcctgcatagaaatatctaggacaatagtttctatactgtctgtaactctgataatctctaaagtcactaactgataccatgaaattgagaagatcaaacgctgaagtaattaatttttctgcctcgtttttactacaactagttttcatcaatgtagtgacgatgtattgtttagttacttttggtctaatactgatgatagagatattattgcttcccataatggatcttctagtagtcaccttaaagcccattgatgcgaatagcagatagataaagtcttggtatgactcctttctaatatagtacggactacctttgtcacccaactttatacccacataagccataacaacctctttaatagccgtttcatgaggtttatcagccatgagcctgagtagttggaagaatctcatgaatcccgtctcagaaagtcctatatgcatgatagatttatctttcctgggaaactctcgtatagtcatagatgaaatactctttaaagtttctgaaataagattagtaacagtcttacctccgactactctaggtaacaaacaaactctaataggtgttttctctgcggagataatatcagaaaggatagagcaataagtagtattattgtgattataaagaccgaatacataacaggtagaatttataaacatcatgtcctgaaggtttttagacttgtattcctcgtaatccataccgtcccaaaacatggatttggtaactttgatagccgtagatctttgttccttcgccaacaggttaaagaaattaataaagaatttgttgtttctatttatgtccacaaattgcacgtttggaagcgccacggttacattcactgcagcattttgaggatcgcgagtatgaagtacgatgttattgtttactggtatatctggaaagaaatctaccagtctaggaataagagattgatatcgcatagaaatagtaaagtttataatctcatcatcgaagagcattttgttaccattgtaataaatatccactctgtcatatgtataaatgaagtactgttcaaacatgatgagatgtttatatgttggcatagtagtgagatcgacgtttggtaatggcaatgtattaagattaactccataatgtctagcagcatctgcgatgttataagcgtcgtcaaagcggggtcgatcttgtattgttatatattgtctaacacctataagattatcaaaatcttgtctgcttaatacaccgttaacaatttttgccttgaattcttttattggtgcattaataacatccttatagaggatgttaaacaaataagtgttatcaaagttaagatctggatatttcttttctgctagaacatccattgagtcggagccatctggtttaatataaccaccgataaatctagctctgtattctgtatccgtcaatctaatattaagaaggtgttgagtgaaaggtggaagatcgtaaaagctgtgagtattaatgataggattagtttccgaactaatgttaattggggtattaataatatctatatttccagcgttaagtgtaacattaaacagttttaattcacgtgacgtggtatcaattaaataattaatgcccaatttggatatagcagcctgaagctcatcttgtttagttacggatcctaatgagttattaagcaatatatcgaacggatgaacgaaggttgttttaagttggtcacatactttgtaatctagacatagatgcggaagaacggtagaaactatacgaaataaatattcagagtcctctaattgatcaagagtaactattgacttaataggcatcatttatttagtattaaatgacgaccgtaccagtgacggatatacaaaacgatttaattacagagttttcagaagataattatccatctaacaaaaattatgaaataactcttcgtcaaatgtctattctaactcacgttaacaacgtggtagatagagaacataatgccgccgtagtgtcatctccagaggaaatatcctcacaacttaatgaagatctatttccagatgatgattcaccggccactattatcgaacgagtacaacctcatactactattattgacgatactccacctcctacgtttcgtagagagttattaatatcggaacaacgtcaacaacgagaaaaaagatttaatattacagtatcgaaaaatgctgaagcaataatggaatctagatctatgataacttctatgccaacacaaacaccatccttgggagtagtttatgataaagataaaagaattcagatgttagaggatgaagtggttaatcttagaaatcaacgatctaatacaaaatcatctgataatttagataattttaccaaaatactatttggtaagactccgtacaaatcaacagaagttaataagcgtatagccatcgttaattatgcaaatttgaacgggtcccccttatcagtcgaggacttggatgtttgttcggaggatgaaatagatagaatctataaaacgattaaacaatatcacgaaagtagaaaacgaaaaattatcgtcactaacgtgattattattgtcataaacattatcgagcaggcattgctaaaactcggatttgaagaaatcaaaggactgagtaccgatatcacttcagaaattatcgatgtggagatcggagatgactgcgatgctgtagcatctaaactaggaatcggtaacagtccggttcttaatattgtattgtttatactcaagatattcgttaaacgaattaaaattatttaatttaatacattcccatatccagacaacaatcgtctggattaatctgttcctgtcgtctcataccggacgacatattaatctttttattagtgggcatctttttagatggtttctttttcccagcattaactgagtcgatacctagaagatcgtgattgatctctccgaccattccacgaacttctaattggccgtctctgacggtaccataaactattttaccagcattagtaacagcttggacaatctgaccatccatcgcattgtacgatgtagtagtaactgttgttctacgtctaggagcaccagaagtatttttggagcccttggatgttgatgtagaagaagacgaggattttgattttggtttacatgtaatacattttgaactctttgattttgtatcacatgcgccggcagtcacatctgtttgagaattaagattattgttgcctcctttgacggctgcatctccaccgatttgcgctagtagatttttaagctgtggtgtaatcttattaactgtttcgatataatcatcgtaactgcttctaacggctaaattttttttatccgccatttagaagctaaaaatatttttatttatgcagaagatttaactagattatacaatgaactaatatgatccttttccagattatttacaaacttggtattttttggttctggaggaggcgaatttaaattcggacttggattcggattttgtaagttcttgatcttattatacatcgagtataggatggcgacagtaactgctacacaaataccgatcaaaagaagaataccaatcatttattgacaataacttcactattgatcaagtatgcaatatatcatcttttcactaaataagtagtaataatgattcaacaatgtcgagatatatggacgataataatttagttcatggaaatatcgctatgattggtgtgaatgactccgctaactctgtggggtgcgcagtgctttccccacatagaataaattagcattccgactgtgataataataccaagtataaacgccataatactcaatactttccatgtacgagtgggactggtagacttactaaagtcaataaaggcgaagatacacgaaagaatcaaaagaatgattccagcgattagcacgccggaaaaataatttccaatcataagcatcatgtccatttaactaataaaaattttaaatcgccgaatgaacaaagtggaatataaaccatataaaaacaatagtttgtactgcaaaaataatatctatttttgttttcgaagatatggtaaaattaaatagtagtacacagcatgttataactaacagcagcaacggctcgtaattacttatcatttactagacgaaaaggtggtgggatattttcttgctcaaataatacgaatatatcacccatccattttatgcgatgtttatatactctaatctttaatagatctatagacgacgggtttaccaacaatatagattttatcgattcatctaatttaaacccttccttaaacgtgaatgatctattatctggcataacgatgaccctacctgatgaatcggacaatgtactgggccatgtagaataaattatcaacgaattatcgtctacgaacatttatatcatttgttttaattttaggacgcgaataaatggatataaaatagaaaataacagatattacaaccagtgttatggccgcgcccaaccaggtaggcagttttattttatcttttactacaggttctcctggatgtacgtcaccaacggcggacgtagttctagtacaattagacgtaagttccgcttgggaattttttaacgctaaagagttaacgttaatcgtgcacccaacgtatttacatctagttcgttgaacatcttgattataatataaccattttctatctctagattcgtcagtgcactcatgtaaccaacataccctaggtcctaaatatttatctccggaattagattttggataattcgcgcaccaacaatttctatttcctttatgatcgttacaaaagacgtataatgccgtatccccaaaagtaaaataatcaggacgaataattctaataaactcagaacaatatctcgcatccatatgtttggagcaaatatcggaataagtagacatagccggtttccgttttgcacgtaaccattctaaacaattggggtttccaggatcgtttctacaaaatccagtcatgaaatcgtcacaatgttctgtcttgtaattattattaaatatttttggacagtgtttggtatttgtcttagaacaacattttgccacgctatcactatcgcccaggagataatccttttttataaaatgacatcgttgcccggatgctatataatcagtagcgtgttttaaatccttaatatattcaggagttacctcgttctgataatagattaatgatccaggacgaaatttgaaagaactacatggttctccatgaattaatacatattgtttagcaaattcaggaactataaaactactacaatgatctatcgacataccatctatcaaacaaaacttgggtttaatttctcccggagatgtttcataatagtacgtataactttcttctgcaaacttaacagctctattatattcaggataattaaaacctaattccatatatttgtctcgtatatctgctattcctggtgctattttgattctattaagagtaacagctgcccccattcttaataatcgtcagtatttaaactgttaaatgttggtatatcaacatctaccttatttcccgcagtataaggtttgttgcaggtatactgttcaggaatggttacatttatacttcttctatagtcctgtctttcgatgttcatcacatatgcaaagaacagaataaacaaaataatgtaagaaataatattaaatatctgtgaattcgtaaatacattgattgccataataattacagcagctacaatacacacaatagacattcccacagtgttgccattacctccacgatacatttgagttactaagcaataggtaataactaagctagtaagaggcaatagaaaagatgagataaatatcatcaatatagagattagaggagggctatatagagccaagacgaacaaaatcaaaccgagtaacgttctaacatcattatttttgaagattcccaaataatcattcattcctccataatcgttttgcatcatacctccatctttaggcataaacgattgctgctgttcctctgtaaataaatctttatcaagcactccagcacccgcagagaagtcgtcaagcatattgtaatatcttaaataactcatttatatattaaaaaatgtcactattaaagatggagtataatctttatgccgaactaaaaaaaatgacttgtggtcaacccctaagtctttttaacgaagacggggatttcgtagaagttgaaccgggatcatcctttaagtttctgatacctaagggattttacgcctctccttccgtaaagacgagtctagtattcgagacattaacaacgaccgataataaaatcactagtatcaatccaacaaatgcgccaaagttatatcctcttcaacgcaaagtcgtatctgaagtagtttctaatatgaggaaaatgatcgaatcaaaacgtcctctatacatcactcttcacttggcgtgtggatttggtaagactattaccacgtgttatcttatggctacacacggtagaaaaaccgtcatttgcgtacccaataaaatgttaatacatcaatggaagacacaggtagaggcagtcggattggaacataagatatccatagatggagtaagtagtctattaaaggaactaaagactcaaagtccggatgtattaatagtagtcagtagacatctgacaaacgatgccttttgtaaatatatcaataagcattatgatttgttcatcttggatgaatcacatacgtataatctgatgaacaatacagcagttacaagatttttagcgtattatcctccgatgatgtgttattttttaactgctacacctagaccatctaaccgaatttattgtaacagtattattaatattgccaagttatccaatctaaaaaaaactatctatgcagtagatagtttttttgagccatattccacagataatattagacatatggtaaaacgactagatggaccatctaataaatatcatatatataccgagaagttattatctgtagacgagcctagaaatcaacttattcttgataccctggtagaagaattcaagtcaggaactattaatcgcattttagttattactaaactacgtgaacatatggtattattctacaaacgattattagattttttcggaccagaggttgtatttataggagacgcccaaaatagacgtactccagatatggtcaaatcaatcaaggaactaaatagatttatattcgtatccaccttattttattccggtactggtttagatattcctagtttggattcgttgttcatttgctcggcagtaatcaacaatatgcaaatagagcaattactagggagggtatgtcgagaaacagaactattagataggacggtatatgtatttcctaacacatccatcaaagaaataaagtacatgataggaaatttcatgcaacgaattattagtctgtctgtagataaactaggatttaaacaaaaaagttatcggaaacatcaagaatccgatcccacttctgcatgtacaacatcatccagagaagaacgtgtattaaatagaatatttaactcgcaaaatcgttaagaagtttaagcgacgatccgcatgctgcgcaggccagtgtattacccctcatagtattaatataatccaatgatacttttgtgatgtcggaaatcttaaccaatttagactgacaggcagaacacgtcatgcaatcatcatcgtcatcgataactgtagtcttgggcttctttttgcgactcttcattccggaacgcacattggtgctatccatttaggtagtaaaaaataagtcagaatatgccctataacacgatcgtgcaaaacctggtatatcgtctctatctttatcacaatatagtgtatcgacatttttattattattgacctcgtttatcttggaacatggaatgggaacatttttgttatcaacggccatctttgccttaattccagatgttgtaaaattataactaaacagtctatcatcgacacaaatgaaattcttgtttagacgtttgtagtttacgtatgcggctcgttcgcgtctcattttttcagatattgcaggtactataatattaaaaataagaatgaaataacataggattaaaaataaagttatcatgacttctagcgctgatttaactaacttaaaagaattacttagtctgtacaaaagtttgagattttcagattctgcggctatagaaaagtataattctttggtagaatggggaacatctacttactggaaaataggcgtgcaaaaggtagctaatgtcgagacgtcaatatctgattattatgatgaggtaaaaaataaaccgtttaatattgatccgggctattacattttcttaccggtatattttgggagcgtctttatttattcgaagggtaaaaatatggtagaacttggatctggaaactcttttcaaataccagatgatatgcgaagtgcgtgtaacaaagtattagacagcgataacggaatagactttctgagatttgttttgttaaacaatagatggataatggaagatgctatatcaaaatatcagtctccagttaatatatttaaactagctagtgagtacggattaaacatacccaaatatttagaaattgaaatagaggaagacacattatttgacgacgagttatactctattatagaacgctctttcgatgataaatttccaaaaatatccatatcgtatattaagttgggagaacttagacggcaagttgtagactttttcaaattctcattcatgtatattgagtccatcaaggtagatcgtataggagataatatttttattcctagcgttataacaaaatcaggaaaaaagatattagtaaaagatgtagaccatttaatacgatccaaggttagagaacatacatttgtaaaagtaaaaaagaaaaacacattttccattttatacgactatgatggaaacggaacagaaactagaggagaagtaataaaacgaattatagacactataggacgagactattatgttaacggaaagtatttctctaaggttggtagtgcaggcttaaagcaattgactaataaattagatattaatgagtgcgcaactgtcgatgagttagttgatgagattaataaatccggaactgtaaaacgaaaaataaaaaaccaatcagcatttgatttaagcagagaatgtttgggatatccagaagcggattttataacgttagttaataacatgcggttcaaaatagaaaattgtaaggttgtaaatttcaatattgaaaatactaattgtttaaataacccgagtattgaaactatatatggaaactttaaccagttcgtctcaatctttaatgtcgtcaccgatgtcaaaaaaagattattcgagtgaaataatatgcgcctttgatataggtgcaaaaaatcctgccagaactgttttagaagtcaaggataactccgttagggtattggatatatcaaaattagactggagttctgattgggaaaggcgcatagctaaagatttgtcacaatatgaatacactacagttcttctagaacgtcagcctagaaggtcgccgtatgttaaatttatctattttattaaaggctttttatatcatacatcggctgccaaagttatttgcgtctcgcctgtcatgtctggtaattcatatagagatcgaaaaaagagatcggtcgaagcatttcttgattggatggacacattcggattgcgagactccgttccggatagacgcaaattagacgatgtagcggatagtttcaatttggctatgagatacgtattagataaatggaatactaattatacaccttataataggtgtaaatctagaaattacataaaaaaaatgtaataacgttagtaacgccattatggataatctatttacctttctacatgaaatagaagatagatatgccagaactatttttaactttcatctaataagttgcgatgaaataggagatatatatggtcttatgaaagaacgcatttcctcagaggatatgtttgataatatagtgtataataaagatatacatcctgccattaagaaactagtgtattgcgacatccaacttactaaacacattattaatcagaatacgtatccggtatttaacgattcttcacaagtgaaatgttgtcattatttcgacataaactcagataatagcaatattagctctcgtacagtagagatatttgagagggaaaagtcatctcttgtatcatatattaaaactaccaataagaagagaaaggtcaattacggcgaaataaagaaaactgttcatggaggcactaatgcaaattacttttccggtaaaaagtctgacgagtatctgagtactacagttagatccaacattaatcaaccttggatcaaaaccatctctaagaggatgagagttgatatcattaatcactctatagtaacgcgtggaaaaagctctatattacaaactatagaaattatttttactaatagaacatgtgtgaaaatattcaaggattctactatgcacattattctatccaaggacaaggatgaaaaggggtgtatacacatgattgacaaattattctatgtctattataatttatttctgttgttcgaagatatcatccaaaacgagtactttaaagaagtagctaatgttgtaaaccacgtactcacggctacggcattagatgagaaattattcctaattaagaaaatggctgaacacgatgtttatggagttagcaatttcaaaatagggatgtttaacctgacatttattaagtcgttggatcataccgttttcccctctctgttagatgaggatagcaaaataaagttttttaaggggaaaaagctcaatattgtagcattacgatctctggaggattgtataaattacgtgactaaatccgagaatatgatagaaatgatgaaggaaagatcgactattttaaatagcatagatatagaaacggaatcggtagatcgtctaaaagaattgcttctaaaatgaaaaaaaacactaattcagaaatggatcaacgactagggtataagtttttggtgcctgatcctaaagccggagttttttatagaccgttacatttccaatatgtatcgtattctaattttatattgcatcgattgcatgaaatcttgaccgtcaagcggccactcttatcgtttaagaataatacagaacgaattatgatagaaattagcaatgttaaagtgactcctccagattactcacctataatcgcgagtattaaaggtaagagttatgacgcattagccacgttcactgtaaatatctttaaagaggtaatgaccaaagagggtatatccatcactaaaataagtagttatgagggaaaagattctcatttgataaaaattccgctactaataggatacgggaataaaaatccacttgatacagccaagtatcttgttcctaatgtcataggtggagtctttatcaataaacaatctgtcgaaaaagtaggaattaatctagtagaaaagattacaacatggccaaaatttagggttgttaagccaaactcattcactttctcgttttcctccgtatcccctcctaatgtattaccgacaagatatcgccattacaagatatctctggatatatcacaattggaagcgttgaatatatcatcgacaaagacatttataacggtcaatattgttttgctgtctcaatatttatctagagtgagtctagaattcattagacgtagtttatcatacgatatgcctccagaagttgtctatctagtaaacgcgataatagatagtgctaaacgaattactgaatctattactgactttaatattgatacatacattaatgacctggtggaagctgaacacattaaacaaaaatctcagttaacgatcaacgagttcaaatatgaaatgctgcataactttttacctcatatgaactatacacccgatcaactaaagggattttatatgatatctttactaagaaagtttctctactgtatcttccacacttctagatatccagatagagattcgatggtttgtcatcgcatcctaacgtacggcaaatattttgagacgttggcacatgatgaattagagaattacataggcaacatccgaaacgatatcatgaacaatcacaagaacagaggcacttacgcggtaaacattcatgtactaacaactcccggacttaatcacgcgttttctagcttattgagtggaaagttcaaaaagtcagacggtagttatcgaacacatcctcactattcatggatgcagaatatttctattcctaggagtgttggattttatccggatcaagtaaagatttcaaagatgttttctgtcagaaaataccatccaagtcaatatctttacttttgttcatcagacgttccggaaagaggtcctcaggtaggtttagtatctcaattgtctgtcttgagttccattacaaatatactaacgtctgagtatttggatttggaaaagaaaatttgtgagtatatcagatcatattataaagatgatataagttactttgaaacaggatttccaatcactatagaaaatgctctagtcgcatctcttaatccaaatatgatatgtgattttgtaactgactttagacgtagaaaacggatgggattcttcggtaacttggaggtaggtattactttagttagggatcacatgaatgaaattcgcattaatattggagcgggaagattagtcagaccattcttggttgtggataacggagagctcatgatggatgtgtgtccggagttagaaagcagattagacgacatgacattctctgacattcagaaagagtttccgcatgtcatcgaaatggtagatatagaacaatttacttttagtaacgtatgtgaatcggttcaaaaatttagaatgatgtcaaaggatgaaagaaagcaatacgatttatgtgactttcctgccgaatttagagatggatatgtagcatcttcattagtgggaatcaatcacaattctggacccagagctattcttggatgtgctcaagctaaacaagctatctcttgtctgagctcggatatacgaaataaaatagacaatggaattcatttgatgtatccagagaggccaatcgtgattagtaaggctttagaaacttcaaagattgcggctaattgcttcggccaacatgttactatagcattaatgtcgtacaaaggtatcaatcaagaggatggaattatcatcaaaaaacaatttattcagagaggcggtctcgatattgttacagccaagaaacatcaagtagaaattccattggaaaactttaataacaaagaaagagataggtctaacgcctattcaaaattagaaagtaatggattagttagactgaatgctttcttggaatccggagacgctatggcacgaaatatctcatcaagaactcttgaagatgattttgctagagataatcagattagcttcgatgtttccgagaaatataccgatatgtacaaatctcgcgttgaacgagtacaagtagaacttactgacaaagttaaggtacgagtattaaccatgaaagaaagaagacccattctaggagacaaatttaccactagaacgagtcaaaagggaacagtcgcgtatgtcgcggatgaaacggaacttccatacgacgaaaatggtatcacaccagatgtcattattaattctacatccatcttctctagaaaaactatatctatgttgatagaagttattttaacagccgcatattctgctaagccgtacaacaataagggagaaaaccgacctgtctgttttcctagtagtaacgaaacatccatcgatacatatatgcaattcgctaaacaatgttatgagcattcaaatccgaaattgtccgatgaagaattatcggataaaatcttttgtgaaaagattctctatgatcctgaaacggataagccttatgcatccaaagtattttttggaccaatttattacttgcgtctgaggcatttaactcaggacaaggcaaccgttagatgtagaggtaaaaagacgaagctcattagacaggcgaatgagggacgaaaacgtggaggaggtatcaagttcggagaaatggagagagactgtttaatagcgcatggtgcagccaatactattacagaagttttgaaagattcggaagaagattatcaagatgtgtatgtttgtgaaaattgtggagacatagcagcacaaatcaagggtattaatacatgtcttagatgttcaaaacttaatctctctcctctcttaacaaaaattgataccacgcacgtatctaaagtatttcttactcaaatgaacgccagaggcgtaaaagtcaaattagatttcgaacgaaggcctccttcgttttataaaccattagataaagttgatctcaagccgtcttttctggtgtaatattctagtttggtagtagatacatatcaatatcatcaaattcgagatccgaattataaaatgggcgtggattgttaactatagaatcggacgtctgatattcgaaaatctgtggagtttcaggttttggtggaggtgtaactgctacttgggatactgaagtctgatattcagaaagctgtggatgttctggttcggcatccaccgatggtgtcacatcactaatcggttcggtaacgtctgtggatggaggtgctacttctacagaacctgtagcctcagttgtcaacggagatacatttttaatgcgagaaaatgtataatttggtaatggtttcttatgtggatctgaagaagaggtaagatatctactagaaagataccgatcacgttctagttctcttttgtagaacttaactttttctttctccgcatctagttgatattccaacctcttcacgttactacgttcagattccaattcacgttcgcatgggttacctccgcagtttttacgagcgatttcacgttcagccttcatgcgtctctccctctctctatcgagtttatcagagcagtctttctgaaggcgatcgaactccataaatttctccaacgctttgattgtttccatagatttccgaagttcagcttttaggactgtgattctttttctttcgaattcacagctggatgtacaaccgtttccattaccgccatctctaagtttcttttctagatcggcaacatttcatccccatgccttttacattcctcgagtctactgtcgtcgaaatatcgttccagctccttttcgacatcaataactttagcacgttgtctctcaagctctcttttgtagttatctgattccctggcacgtttaagatcttcatgcaattgagtcagctcttaacttcctctcttgcttcttcgtcatagtacgcgcaatcactgtgagatccattgttaccacgtctacactcggcgagctcgcgtttaagagattcaatttcccgtttgtattggtccatgtttccattgctaccaccattagatttacaggctgctagttgtcgttcgagatcagaaatacgggttttcttggaattgatttcgtcgatgtacttggcatcgaaacacttattaagttctttttccaattctacgattttatttctttcgcgagtcaattccctcctgtagtaactatctgttttgtcagattcacgctctctacgtagactttcttgcaagttactaatttgttccctagcacgtccgagtttagttttatatgctgaatagagttctgattcatcctttgagcagatctctagcgatcgtttaagattcctaattctagtctttagcctatttacctcctcagaagatgttccgttaccgttgcgtttacactcgttaagctgtctatcaagatccatgattctatctctaagacgttgcatctctctttccatatcagcattgctttcattattacgtctgcagtcactcaactgtctttcaatatctgagattctatctctaagacgtcgcatctctctctgtttcggcattggtttcattattacgtttacagtcgttcaactgtctttcaagatctgatattctagattggagtctgctaatctctgtagcattttcacggcattcactcagttgtctttcaagatctgaaattttagattggagtctgctaatctctgtaagatttcctcctccgctctcgatgcagtcggtcaacttattctctagttctctaatacgcgaacgcagtgcatcaacttcttgcgtgtcttcctggttgcgtgtacattcatcgagatctctaacgcgtcgtcgttcttcctcaagttctctgcgtactacagaaagcgtgtccctatcttgttgatatttagcaatttctgattctagagtactgattttgcttacgtagttactaatagttgtcttggccttatcaagatcctccttgtatttgtcgcattccttgatatccctacgaagtctggacagttcccattcgacattacgacgtttatcgatttcagctcggagatcgtcatcgcgttgttttagccacatacgactgagttcaagttctcgttgacaagatccatctacttttccattcctaatagtatccagttccttttctagttctgaacgcatttctcgttccctatcaagcgattctctcaattctcggatagtcttcttatcaatttctaataaatctgaaccatcatctgtcccattttgaatatccctgtgttctttgatctcttttgtaagtcggtcgattctttcggttttataaacagaatccctttccaaagtcctaatcttactgagtttatcactaagttctgcattcaattcggtgagttttctcttggcttcttccaactctgttttaaactctccactatttccgcattcttcctcgcatttatctaaccattcaattagtttattaataactagttggtaatcagcgattcctatagccgttcttgtaattgtgggaacataattaggatcttctaatggattgtatggcttgatagcatcatctttatcattattagggggatggacaaccttaattggttggtcctcatctcctccagtagcgtgtggttcttcaataccagtgttagtaataggcttaggcaaatgcttgtcgtacgcgggcacttcctcatccatcaagtatttataatcgggttctacttcagaatattcttttctaagagacgcgacttcgggagttagtagaagaactctgtttctgtatctatcaacgctggaatcaatactcaagttaaggatagcgaatacctcatcgtcatcatccgtatcttctgaaacaccatcatatgacatttcatgaagtctaacgtattgataaatagaatcagatttagtattaaacagatccttaacctttttagtaaacgcatatgtatattttagatctccagatttcataatatgatcacatgccttaaatgtcagtgcttccatgatataatctggaacactaatgggtgacgaaaaagatacagcaccatatgctacgttgataaataaatctgaaccactaagtagataatgattaatgttaagaaagaggaaatattcagtgtataggtatgtcttggcgtcatatcttgtactaaacacgctaaacagtttgttaatgtgatcaatttccaatagattaattagagcagcgggaataccaacaaacatattaccacatccgtattttctatgaatatcacatatcatgttaaaaaatcttgatagaagagcgaatatctcgtctgacttaatgagtcgtagttcagcagcaacataagtcataactgtaaatagaacatactttcctgtagtgttgattctagactccacatcaacaccattattaaaaatagttttatatacatctttaatctgctctccgttaatcgtcgaacgttctagtatacggaaacactttgatttcttatctgtagttaatgacttagtgatatcacgaagaatattacgaattacatttcttgtttttcttgagagacctgattcagaactcaactcatcgttccatagtttttctacctcagtggcgaaatctttggagtgcttggtacatttttcaataaggttcgtgacctccatttattataaaaaatttattcaaaacttaactacaatcgggtaattataagatcgtagatctcccatgtggcggaatactaccatctatcgcatgtggatggacagtaggtaatggccatgggaacagtaatgtttgcatatttatctttcttgctagtattactgcatattgtcccaatgtttcgatgtgatgttctaacctatcaactgccgctgtatcacaacaatagtgtccgatgaaattaagattatgatccaatgtgtttaatatatgattatcaagtcttatacgatccgcgtcttttttgacaggatcaggttcttctacaggaagaagtttcggcctcttatgatattcatgtctgggaaacggtggtctagggtgaggctccggtatcggagtgggttttggattataatcatcatcgtctatgacatcatcttcgacttcgatatttattttgctatcttgatgatgtcctgtatcagttgcattttcagcactcgactgaatattagcgcattcattgtctattattaccatatttctaaacccaaaatgtatgtgttgaacatcagtactatcgttgatgagtcttatagcatgaattcgcttatcgttatcgggtttatcttctgtcaccttagcaattccttttttattaaactctacataatcatatccatttctattgtttgttctaatataaacgagtatagcatcattgctaaatttttcaatagtatcaaaaacagaatatcctaaaccatataatatatattcaggaacactcaaactaaatgtccaggattctcctaaatacgtaaactttaatagtgcgaaatcattcaaaaatctaccacttatagatagatagtacataaatgcgtatagtagtctacctatctctttattatgaaaaccggcattacgatcatatatgtcgtgatatacctgtgatccgtttacgttaaaccataaatacatgggtgatcctataaacatgaatttatttctaattctcagagctatagttaattgaccgtgtaatatttgcttacatgcatacttgatacgcttattaataagatttttatcattgctcgttatttcagaatcgtatatataaggagtaccatcgtgattcttaccagatattatacaaaatactatatataaaatatattgacccacgttagtaatcatataaatgtttaacgttttaaattttgtattcaatgatccattatcatacgctatcatggtcttgtaatattcattctttaaaatataatattgtgttagccattgcattggagctcctaatggagattttctattctcatccattttaggataggctttcataaagtccctaataacttcgtgaataatgtttctatgttttctactgatgcatgtatttgcttcgatttttttatcccatgtttcatctatcatagatttaaacgcagtaatgctcgcaacattaacatcttgaaccgttggtacaattccgttccataaatttataatgttcgccatttatataactcattttttgaatatacttttaattaacaaaagagttaagttactcatatggacgccgtccagtctgaacatcaatctttttagccagagatatcatagccgctcttagagtttcagcgtgattttccaacctaaatagaacttcatcgttgcgtttacaacacttttctatttgttcaaactttgttgttacattagtaatctttttttccaaattagttagccgttgtttgagagtttcctcattgtcgtcttcatcggctttaacaattgcttcgcgtttagcctctggctttttagcagcctttgtagaaaaaaattcagttgctggaattgcaagatcgtcatctccggggaaaagagttccgtccatttaaagtacagattttagaaactgacactctgcgttatttatatttggtacaacacatggattataaatattgatgttaataacatcagaaaatgtaaagtctatacattgttgcatcgtgttaaattttctaatggatctagtattattgggtccaacttctgcctgaaatccaaatatggaagcggatacaaaaccgtttcctggataaaccacacatctccacttttgctttacatcagaaattgtgtcgttgacatcttgaactctcctatctaatgccggtgttccacctatagattttgaatattcgaatgctgcatgagtagcattaaattccttaatattgccataattttcatatattgagtaaccctggataaaaagtaaacacaccgcagccgtcgctaccacaataaaaaaaattgatagagagttcatttataatctattagaagctgacaaaatttttttacacgcatcagacaatgctttaataaatagttcaacatctacttttgtcatatcgaaccgatggtatgattctaacctagaattacatccgaaaaagttgactatgttcatagtcattaagtcattaacaaacaacattccagactctggattataagacgatactgtttcgtcacaattacctaccttaatcatgtgattatgaatattggctattagagcaccttctaagaaatctataatatctttgaaacacgatttaaaatcaaaccacgaatatacttctacgaagaaagttagtttacccataggagaaataactataaatggagatctaaatacaaaatccggatctatgatagttttaacattattatattctctattaaatacctccacatctaaaaatgttaattttgaaactatgtcttcgtttattaccgtacctgaactaaacgctataagctctattgtttgagaactctttaaacgatattcttgaaatacatgtaacaaagtttcctttaactcggtcggtttatctaccatagttacagaatttgtatccttatctataatataataatcaaaatcgtataaagttatataattatcgcgttcagattgtgatcttttcaaatagactaaaaaccccatttctctagtaagtatcttatgtatatgtttgtaaaatatcttcatggtgggaatatgctctaccgcagttagccattcctcattgacagcggtagatgtattagacaaaactattccaatgtttaacaagggccattttacgagattattaaatccttgtttgataaatgtagccaatgagggttcgagttcaacgacgattgaattctcttcccgcggatgctgcatgatgaacgacgggatgttgttcgattgatttggaattctttttcgactttttgtttatattaaatattttaaaatttatagcggatagcaattcatgtaccacggataatgtagacgcgtattgcgcatcgatatctttattattagataaatttatcaataaatgtgagaagtttgcctcgttaaggtcttccatttaaatattatataaacatttgtgtttgtatcttattcgtcttttatggaatagttttttactagtaaagctgcaattacacactttgtccgtaaaacataaatataaacaccagcttttatcaatcgttccaaaaagtcgacggcggacatttttaacatggcatctattttaaatacacttaggtttttggaaaaaacatcattttataattgtaacgattcaataactaaagaaaagattaagattaaacataagggaatgtcatttgtattttataagccaaagcattctaccgttgttaaatacttgtctggaggaggtatatatcatgatgatttggttgtattggggaaggtaacaattaataatctaaagatgatgctattttacatggatttatcatatcatggagtgacaagtagtggagcaatttacaaattgggatcgtctatcgatagactttctctaaataggactattgttacaaaagttaataattatgatgatacattttttgacgacgatgattgatcgctattgcacaattttgtttttgtactttctaatatagtgtttaggttctttttcatatgagaatattgatttactaaaatatctatgtttaacttttgttctatgacgtccttatcggcggtatcggtacatatacgtaattcaccttcacaaaatacggagtcttcgataataatagccaatcgattattggatctagctgtctgtatcatattcaacatgtttaatatatcctttcgtttcccctttacaggcatcgatcgtagcatattttccgcgtctgatatggaaatgttaaaactacaaaaatgcgtaatgttagcccgtcctaatattggtacgtgtctataagtttggcatagtagaataatagacgtgtttaaatgccttccaaagtttaagaattctattagagtattgcattttgatagtttatcgcctacatcatcaaaaataagtaaaaagtgtgctgattttttatgattttgtgcgacagcaatacatttttctatgttacttttagttcgtatcagattatattctagagattcctgactactaacgaaattaatatgatttggccaaatgtatccatcataatctgggttataaacgggtgtaaacaagaatatatgtttatattttttaactagtgtagaaaacagagatagtaaatagatagtttttccagatccagatcctcctgttaaaaccattctaaacggcatttttaataaattttctcttgaaaattgtttttcttggaaacaattcataattatatttacagttactaaattaatttgataataaatcaaaatatggaaaactaaggttgttagtagggaggagaacaaagaaggcacatcgtgatataaataacatttattatcatgatgacaccagaaaacgacgaagagcagacatctgtgttctccgctactgtttacggagacaaaattcagggaaagaataaacgcaaacgcgtgattggtctatgtattagaatatctatggttatttcactactatctatgattaccatgtccgcgtttctcatagtgcgcctaaatcaatgcatgtctgctaacgaggctgctattactgacgccgctgttgccgttgctgctgcatcatctactcatagaaaggttgcgtctagcactacacaatatgatcacaaagaaagctgtaatggtttatattaccagggttcttgttatatattacattcagactaccagttattctcggatgctaaagcaaattgcactgcggaatcatcaacactacccaataaatccgatgtcttgactacctggctcattgattatgttgaggatacatggggatctgatggtaatccaattacaaaaactacatccgattatcaagattctgatgtatcacaagaagttagaaagtatttttgtgttaaaacaatgaactaatatttatttttgtacattaataaatgaaatcgcttaatagacaaactgtaagtaggtttaagaagttgtcggtgccggccgctataatgatgatactctcaaccattattagtggcataggaacatttctgcattacaaagaagaactgatgcctagtgcttgcgccaatggatggatacaatacgataaacattgttatttagatactaacattaaaatgtctacagataatgcggtttatcagtgtcgtaaattacgagctagattgcctagacctgatactagacatctgagagtattgtttagtattttttataaagattattgggtaagtttaaaaaagaccaatgataaatggttagatattaataatgataaagatatagatattagtaaattaacaaattttaaacaactaaacagtacgacggatgctgaagcgtgttatatatacaagtctggaaaactggttaaaacagtatgtaaaagtactcaatctgtactatgtgttaaaaaattctacaagtgacaacaaaaaatgaattaataataagtcgttaacgtacgccgccatggacgccgcgtttgttattactccaatgggtgtgttgactataacagatacattgtatgatgatctcgatatctcaatcatggactttataggaccatacattataggtaacataaaaactgtccaaatagatgtacgggatataaaatattccgacatgcaaaaatgctactttagctataagggtaaaatagttcctcaggattctaatgatttggctagattcaacatttatagcatttgtgccgcatacagatcaaaaaataccatcatcatagcatgcgactatgatatcatgttagatatagaagataaacatcagccattttatctattcccatctattgatgtttttaacgctacaatcatagaagcgtataacctgtatacagctggagattatcatctaatcatcaatccttcagataatctgaaaatgaaattgtcgtttaattcttcattctgcatatcagacggcaatggatggatcataattgatgggaaatgcaatagtaattttttatcataaaagttgtaaagtaaataataaaacaataaatattgaactagtagtacgtatattgagcaatcagaaatgatgctggtacctcttatcacggtgaccgtagttgcgggaacaatattagtatgttatatattatatatttgtaggaaaaagatacgtactgtctataatgacaataaaattatcatgacaaaattaaaaaagataaagagttctaattccagcaaatctagtaaatcaactgatagcgaatcagactgggaggatcactgtagtgctatggaacaaaacaatgacgtagataatatttctaggaatgagatattggacgatgatagcttcgctggtagtttaatatgggataacgaatccaatgttatggcgcctagcacagaacacatttacgatagtgttgctggaagcacgctgctaataaataatgatcgtaatgaacagactatttatcagaacactacagtagtaattaatgaaacggagactgttgaagtacttaatgaagataccaaacagaatcctaactattcatccaatcctttcgtaaattataataaaaccagtatttgtagcaagtcaaatccgtttattacagaacttaacaataaatttagtgagaataatccgtttagacgagcacatagcgatgattatcttaataagcaagaacaagatcatgaacacgatgatatagaatcatcggtcgtatcattggtgtgattagtttcctttttataaaattgaagtaatatttagtattattgctgccgtcacgttgtacaaatggagatattccctgtattcggcatttctaaaattagcaattttattgctaataatgactgtagatattatatagatacagaacatcaaaaaattatatctgatgagatcaatagacagatggatgaaacggtacttcttaccaacatcttaagcgtagaagttgtaaatgacaatgagatgtaccatcttattcctcatagattatcgacgattatactctgtattagttctgtcggaggatgtgttatctctatagataatgacatcaatggcaaaaatattctaacctttcccattgatcatgctgtaatcatatccccactgagtaaatgtgtcgtagttagcaagggtcctacaaccatattggttgttaaagcggatatacctagcaaacgattggtaacatcgtttacaaacgacatactatatgtaaacaatctgtcactgattaattatttgccgttgtctgtattcattattagacgagtcaccgactatttggatagacacatatgcgatcagatatttgctaataataagtggtattcccttataaccatcgacgataagcaatatcctattccatcaaactgtataggtatgtcctctgccaagtacataaattctagcatcgagcaagatactttaatccatgtttgtaacctcgagcatccgttcgactcagtatacaaaaaaatgcagtcgtacaattctctacctatcaaggaacaaatattgtacggtagaattgataatataaatatgagcattagtatttctgtggattaatagatttctagtatggggatcattaatcatctctaatctctaaatacctcataaaacgaaaaaaaagctattatcaaatactgtacggaatggattcattctcttctctttttatgaaactctgttgtatatctactgataaaactggaagcaaaaaatctgatagaaagaataagaataagatcaaggattatatggaacacgattattataaaataacaatagttcctggttcctcttccacgtctactagctcgtggtattatacacatgcctagtaatagtctctttgcgttgacggaaagcagactagaaataacaggctaaaatgttcagacaccataatagttcccaacccagataataacagagttccatcaacacattcctttaaactcaatcccaaacccaaaaccgttaaaatgtatccggccaattgatagtagataatgaggtgtacagcgcatgataatttacacagtaaccaaaatgaaaatactttagtaattataagaaatatagacggtaatgtcatcatcaacaatccgataatatgcctgagagtaaacattgacggataaaacaaaaatgctccgcataactctatcatggcaataacacaaccaaatacttgtaagattcctaaattagtagaaaatacaacgaatatcgatgtataagtgatctcgagaaataataagaataaagtaatgcccgtaaagataaacatcaacattgtttggtaatcattaaaccaattagtatgaagttgaactaatttcacagtagattttattccagtgttatcctcgcatgtataagtacctggtaagatatctttatattccataatcaatgagacatcactatctgataacgaatgaagtctagcactagtatgccatttacttaatattgtcgtcttggaagttttattataagttaaaatatcatggttatccaatttccatctaatatactttgtcggattatctatagtacacggaataatgatggtatcattacatgctgtatactctatggtctttgtagttgttataacaaccaacgtatagaggtatatcaacgatattctaactcttgacattttttatttatttaaaatgatacctttgttatttattttattctattttgctaacggtattgaatggcataagtttgaaacgagtgaagaaataatttctacttacttattagacgacgtattatacacgggtgttaatggggcggtatacacattttcaaataataaactaaacaaaactggtttaactaataataattatataacaacatctataaaagtagaggatgcggataaggatacattagtatgcggaaccaataacggaaatcccaaatgttggaaaatagacggttcagacgacccaaaacatagaggtagaggatacgctccttatcaaaatagcaaagtaacgataatcagtcacaacggatgtgtactatctgacataaacatatcaaaagaaggaattaaacgatggagaagatttgacggaccatgtggttatgatttattcacggcggataacgtaattccaaaagatggtttacgaggagcattcgtcgataaagacggtacttatgacaaagtttacattcttttcactgatactatcggctcaaagagaattgtcaaaattccgtatatagcacaaatgtgcctaaacgacgaaggtggtccatcatcattgtctagtcatagatggtcgacgtttctcaaagtcgaattagaatgtgatatcgacggaagaagttatagacaaattattcattctagaactataaaaacagataatgatacgatactatatgtattcttcgatagtccttattccaagtccgcattatgtacctattctatgaataccattaaacaatctttttctacgtcaaaattggaaggatatacaaagcaattgccgtctccagctcctggtatatgtttaccagctggaaaagttgttccacataccacgtttgaagtcatagaacaatataatgtactagatgatattataaagcctttatctaaccaacctatcttcgaaggaccgtctggtgttaaatggttcgatataaaggagaaggaaaatgaacatcgggaatatagaatatacttcataaaagaaaattctatatattcgttcgatacaaaatctaaacaaactcgtagctcgcaagtcgatgcgcgactattttcagtaatggtaactgcgaaaccgttatttatagcagatatagggataggagtaggaatgccacaaatgaaaaaaatacttaaaatgtaatcttaatcgagtacaccacacgacaatgaacaaacataagacagattatgctggttatgcttgctgcgtaatatgcggtctaattgtcggaattatttttacagcgacactattaaaagttgtagaacgtaaattagttcatacaccattaatagataaaacgataaaagatgcatatattagagaagattgtcctactgactggataagctataataataaatgtatccatttatctactgatcgaaaaacctgggaggaaggacgtaatgcatgcaaagctctaaattcaaattcggatctaattaagatagagactccaaacgagttaagttttttaagaagccttagacgaggctattgggtaggagaatccgaaatattaaaccagacaaccccatataattttatagctaagaatgccacgaagaatggaactaaaaaacggaaatatatttgtagcacaacgaatactcccaaactgcattcgtgttacactatataacaattacactacatttttatcataccactacttcggttagatgttttagaaaaaaataaatatcgccgtaccgttcttgtttttataaaaataacaattaacaattatcaaattttttctttaatattttacgtggttgaccattcttggtggtaaaataatctcttagtgttggaatggaatgctgtttaatgtttccacactcatcgtatattttgacgtatgtagtcacatcgtttacgcaatagtcagactgtagttctatcatgcttcctacatcagaaggaggaacagttttaaagtctcttggttttaatctattaccgttagttttcatgaaatcctttgttttatccacttcacattttaaataaatgtccactatacattcttttgttaattttactagatcgtcatgggtcatagaatttataggttccgtagtccatggatccaaactagcaaacttcgcgtatacggtatcgcgattagtgtatacaccaactgtatgaaaattaagaaaacagtttaataaatcaacagaaatatttaatcctccgtttgatacagatgcgccatatttatggatttcggattcacacgttgtttgtctgaggtgttcgtctagtgttgcttctacgtaaacttcgattcccatatattctttattgtcagaatcgcataccgatttatcatcatacactgtttgaaaactaaatggtatacacatcaaaataataaataataacgagtacattctgcaatattgttatcgtaattggaaaaatagtgttcgagtgagttggattatgtgagtattggattgtatattttattttatattttgtaataagaataaaatgctaatgtcaagtttattccaatagatgtcttattaaaaacatatataataaataacaatggctgaatggcataaaattatcgaggatatctcaaaaaataataagttcgaggatgccgccatcgttgattacaagactacaaagaatgttctagctgctattcctaacagaacatttgccaagattaatccgggtgaaattattcctctcatcactaatcgtaatattctaaaacctcttattggtcagaaatattgtattgtatatactaactctctaatggatgagaacacgtatgctatggagttgcttactgggtacgcccctgtatctccgatcgttatagcgagaactcataccgcacttatatttttgatgggtaagccaacaacatccagacgtgacgtgtatagaacgtgtagagatcacgctacccgtgtacgtgcaactggtaattaaaataaaaagtaatattcatatgtagtgtcaattttaaatgatgatgatgaaatggataatatccatattgacgatgtcaataatgccggtattggcatacagttcatcgatttttagatttcattcagaggatgtggaattatgttatgggcatttgtattttgataggatctataatgtagtaaatataaaatataatccgcatattccatatagatataattttattaatcgcacgttaaccgtagatgaactagacgataatgtcttttttacacatggttattttttaaaacacaaatatggttcacttaatcctagtttgattgtctcattatcaggaaacttaaaatataatgatatacaatgctcagtaaatgtatcgtgtctcattaaaaatttggcaacgagtacatctactatattaacatctaaacataagacttattctctacatcggtccacgtgtattactataataggatacgattctattatatggtataaagatataaatgacaagtataatgacatctatgattttactgcaatatgtatgctaatagcgtctacattgatagtgaccatatacgtgtttaaaaaaataaaaatgaactcttaattatgctatgctattagaaatggataaaatcaaaattacggttgattcaaaaattggtaatgttgttaccatatcgtataacttggaaaagataactattgatgtcacacctaaaaagaaaaaagaaaaggatgtattattagcgcaatcagttgctgtcgaagaggcaaaagatgtcaaggtagaagaaaaaaatattatcgatattgaagatgacgatgatatggatgtagaaagcgcgtaatacgatctataaaaataagtatataaatactttttatttactgtactcttactgtgtagtggtgataccctactcgattatttttttaaaaaaaaaatacttattctgattcttctagccatttccgtgttcgtttgaatgccacatcgacgtcaaagataggggagtagttgaaatctagttctgcattgttggtacgcacctcaaatgtagtgttggatatcttcaacgtatagttgttgagtagtgatggttttctaaatagaattctcttcatatcattcttgcacgcgtacatttttagcatccatcttggaatcctagatccttgttctattcccaatggtttcatcaatagaagattaaacatatcgtacgaacacgatggagagtaatcgtagcaaaagtaagcatttcctttaatcttagatcccggatactggatatattttgcagccaacacgtgcatccatgcagcatttcctacatatacccggctatgcaccgcgtcatcatcgactgtacgatacataatgttaccgtgttgcttacattgctcgtaaaagactttcatcaatttgtctccttctccgtaaattccagtgggtcttaggcaacaagtatacaattttgctccattcatgattacggaattattggctttcataaccagttgctcggccatacgtttactttttgcgtatacatgtcctggtgatatatcataaagggtatgctcatggccgatgaatggatcaccgtgtttattgggtcctattgcttccatgctactagtatagatcaaatacttgattcctaggtccacacaagctgccaaaatagtctgtgttccataatagtttactttcatgatttcattatcggtgtattttccaaatacatccactagagcagccgtatgaataatcagatttaccccatctagcgcttctctcaccttatcaaagtcgtttatatcacattgtatatagtttataaccttaactttcgaggttattggttgtggatcttctacaatatctatgactctgatttcttgaacatcatctgcactaattaacagttttactatatacctgcctagaaatccggcaccaccagtaaccgcgtacacggccattgctgccactcataatatcagactacttattctattttactaaataatggctgtttgtataatagaccacgataatatcagaggagttatttactttgaaccagtccatggaaaagataaagttttaggatcagttattggattaaaatccggaacgtatagtttgataattcatcgttacggagatattagtcaaggatgtgattccataggcagtccagaaatatttatcggtaacatctttgtaaacagatatggtgtagcatatgtttatttagatacagatgtaaatatatttacaattattggaaaggcgttatctatttcaaaaaatgatcagagattagcgtgtggagttattggtatttcttacataaatgaaaagataatacattttcttacaattaacgagaatggcgtttgatatatcagttaatgcgtctaaaacaataaatgcattagtttacttttctactcagcaaaataaattagtcatacgtaatgaagttaatgatacacactacactgtcgaatttgatagggacaaagtagttgacacgtttatttcatataatagacataatgacaccatagagataagaggggtgcttccagaggaaactaatattggttgcgcggttagtatgacttacttgtataataagtatagttttaaactgattttagcagaatatataagacacagaaatactatatccggcaatatttattcggcattgatgacactagatgatttggctattaaacagtatggagacattgatctattatttaatgagaaacttaaagtagactccgattcgggactatttgactttgtcaactttgtaaaggatatgatatgttgtgattctagaatagtagtagctctatctagtctagtatctaaacattgggaattgacaaataaaaaatataggtgtatggcattagccgaacatatatctgatagtattccaatatctgagctatctagactacgatacaatctatgtaagtatctacgcggacacactgagagcatagaggataaatttgattattttgaagacgatgattcgtctacatgttctgccgtaaccgacagggaaacggatgtataattttttttatagcgtgaaggatatgataaaaaatataattgttgtatttatcccattccaatcaccttatatgattctgtaacacaataaaggagtcttatagatgtatagaggtcagatactggtttgataaactgtttattccacataagtatgtttgactttatggttagacccgcatactttaacaaatcactgaaaattggagttaggtattgacctctcagaatcagttgccgttctggaacattaaatgtattttttatgatatactccaacgcatttatgtgggcatacaacaagtcattactaatggaatattccaagagttttagttgtctagtatttaacaagagaagagatttcaacagactgtttatgaactcgaatgccgcctcattgtcgcttatattgatgatgtcgaattctcccaatatcatcaccgatgagtagctcatcttgttatcgggatccaagttttctaaagatgtcattaaaccctcgatcatgaatggatttatcatcatcgtttttatgttggacatgagcttagtccgtttgtccacatctatagaagatgatttctgaattatttcatatatctctctctttaactccaggaacttgtcaggatggtctactttaatatgttctcgtctaagagatgaaaatctttggatggttgcacgcgacttttctctaaaggatgacgttgcccaagatcctctcttaaatgaatccatcttatccttggacaagatggacagtctattttccttagatggtttaatatttttgttacccatgatctataaaggtagacctaatcgtctcggatgaccatatatttattttcagttttattatacgcataaattgtaaaaaatatgttaggtttacgaaaatgtctcgtggggcattaatcgtttttgaaggattggacaaatctggaaaaacaacacaatgtatgaacatcatggaatcaataccttcaaacacaataaaataccttaactttcctcagagatccactgtcactggaaagatgatagatgactatctaactcgtaaaaaaacctataatgatcatatagttaatctattattttgtgcaaatagatgggagtttgcatcttttatacaagaacaactagaacagggaattactttaatagttgatagatacgcattttctggagtagcgtatgccgccgctaaaggcgcgtcaatgactctcagtaagagttatgaatctggattgcctaaacccgacttagttatattcttggaatctggtagcaaagaaattaatagaaacgtcggtgaggaaatttatgaagatgttacattccaacaaaaggtattacaagaatataaaaaaatgattgaagaaggagatattcattggcaaattatttcttctgaattcgaggaagatgtaaagaaggagttgattaagaatatagttatagaggctatacacacggttactggaccagtggggcaactgtggatgtaatagtgaaattacattttttataaatagatgttagtacagtgttataaatggatgaagcatattactctggcaacttggaatcagtactcggatacgtgtccgatatgcataccgaactcgcatcaatatctcaattagttattgccaagatagaaactatagataatgatatattaaacaaggacattgtaaattttatcatgtgtagatcaaacttggataatccatttatctctttcctagatactgtatatactattatagatcaagagaactatcagactgagttgattaattcattagacgacaatgaaattatcgattgtatagttaataagtttatgagcttttataaggataacctagaaaatatagtagatgctatcattactctaaaatatataatgaataatccagattttaaaactacgtatgccgaagtactcggttccagaatagccgatatagatattaaacaagtgatacgtaagaatatactacaattgtctaataatatccgcgaacgatatttgtgaaaatattaaaaaaaaatactttttttattaaatgacgtcttttcgtgaatttagaaaattatgctgtgctatatatcacgcatcaggatataaagaaaaatctaaattaattagagactttataacagatagggatgataaatatttgatcattaagctattgcttcccggattagacgatagaatttataacatgaacgataaacaaattataaaattatatagtataatatttaaacaatctcaggaagatatgctacaagatttaggatacggatatataggagacactattaggactttcttcaaagagaacacagaaatccgtccacgagataaaagcattttaactttagaagaagtggatagttttttaactacgttatcatccgtaactaaagaatcgcatcaaataaaattattgactgatgtagcatctgtttgtacatgtaatgatttaaaatgtgtagtcatgcttattgataaagatctaaaaattaaagcgggtcctcggtacgtacttaacgctattagtcctaatgcctatgatgtgtttagaaaatctaataacttgaaagagataatagaaaattcatctaaacaaaatctagactctatatctatttctgttatgactccaattaatcccatgttagcggaatcgtgtgattctgtcaataaggcgtttaaaaaatttccatcaggaatgtttgcggaagtcaaatacgatggtgaaagagtacaagttcataaaaataataacgagtttgccttctttagtagaaacatgaaaccagtactctctcataaagtggattatctcaaagaatacataccgaaagcatttaaaaaagctacgtctatcgtattggattctgaaattgttcttgtagacgaacataatgtaccgctcccgtttggaagtttaggtatacacaaaaagaaagaatataaaaactctaacatgtgtttgttcgtgtttgactgtttgtactttgatggattcgatatgacggacattccattgtacgaacgaagatcttttctcaaagatgttatggttgaaatacccaatagaatagtattctcagagttgacgaatattagtaacgagtctcagttaactgacgtattggatgatgcactaacgagaaaattagaaggattggtcttaaaagatattaatggagtatacgaaccgggaaagagaagatggttaaaaataaagcgagactatttgaacgagggttccatggcagattctgccgatttagtagtactaggtgcctactatggtaaaggagcaaagggtggtatcatggcagtctttctaatgggttgttacgacgatgaatccggtaaatggaagacggttaccaagtgttcaggacacgatgataatacgttaagggagttgcaagaccaattaaagatgattaaaattaacaaggatcccaaaaaaattccagagtggttagtagttaataaaatctatattcccgattttgtagtagaggatccgaaacaatctcagatatgggaaatttcaggagcagagtttacatcttccaagtcccataccgcaaatggaatatccattagatttcctagatttactaggataagagaggataaaacgtggaaagaatctactcatctaaacgatttagtaaacttgactaaatcttaatagttacatacaaactgaaaattaaaataacactatttagttggtggtcgccatggatggtgttattgtatactgtctaaacgcgctagtaaaacatggcgaggaaataaatcatataaaaaatgatttcatgattaaaccatgttgtgaaagagtttgtgaaaaagtcaagaacgttcacattggcggacaatctaaaaacaatacagtgattgcagatttgccatatatggataatgcggtatccgatgtatgcaattcactgtataaaaagaatgtatcaagaatatccagatttgctaatttgataaagatagatgacgatgacaagactcctactggtgtatataattattttaaacctaaagatgccattcctgttatcatatctataggaaaggataaagatgtctgtgaactattaatctcatcagacatatcgtgtgcatgcgtggagttaaattcatatcacgtagccattcttcccatggatgtttccttttttaccaaaggaaatgcatcattgattattctcctgtttgatttctctatcgatgcggcacctctcttaagaagtgtaaccgataataatgttattatatctagacaccagcgtctacatgacgagcttccgagttccaattggttcaagttttacataagtataaagtccgactattgttctatattatatatggttgttgatggatctgtgatgcatgcgatagctgataatagaactcacgcaattattagcaaaaatatattagacaatactacgattaacgatgagtgtagatgctgttattttgaaccacagattaggattcttgatagagatgagatgctcaatggatcatcgtgtgatatgaacagacattgtattatgatgaatttacctgatgtaggcgaatttggatctagtatgttggggaaatatgaacctgacatgattaagattgctctttcggtggctggtaatttaataagaaatcgagactacattcccgggagacgaggatatagctactacgtttacggtatagcctctagataatttttttaagcacgaaataaaaaacataattttaaaccaatctatttcatactattttgtgtgatcaccatggacataaagatagatattagtatttctggtgataaatttacggtgactactaggagggaaaatgaagaaagaaaaaaatatctacctctccaaaaagaaaaaactactgatgttatcaaacctgattatcttgagtacgatgacttgttagatagagatgagatgtttactattctagaggaatattttatgtacagaggtctattaggcctcagaataaaatatggacgactctttaacgaaattaaaaaattcgacaatgatgcggaagaacaattcggtactatagaagaactcaagcagaaacttagattaaattctgaagagggagcagataactttatagattatataaaggtacaaaaacaggatatcgtcaaacttactgtatacgattgcatatctatgataggattgtgtgcatgcgtggtagatgtttggagaaatgagaaactgttttctagatggaaatattgtttacgagcgattaaactgtttattgatgatcacatgcttgataagataaaatctatactgcagaatagactagtatatgtggaaatgtcatagaaagttaaaagttaatgagagcaaaaatatataaggttgtattccatatttgttatttttttctgtaatagttagaaaaatacattcgatggtctatctatcagattattatgtgttataaggtactttttctcataataaactagagtatgagtaagatagtgtttttcaaaacatataaatctaaaattgatggatgagatatacagctattaatttcgaaaatatattttaatctgataactttaaacatggatttttaatggtggtttaacgttttaaaaaaagattttgttattgtagtatatgataatattaaaagatggatataaagaatttgctgactgcatgtactattttttacattactacattggctacggcagatatacctacttcgtcactgccacacgctccggtaaacggggcatgtgacgagggagaatatcttgataagaggcataatcaatgttgtaatcagtgtccacctggagaatttgccaaggttagatgtaatggtaacgataacacaaaatgtgaacgctgcccacctcatacatataccgcaatccccaattactctaatggatgtcatcaatgtagaaaatgcccaacaggatcatttgataaggtaaagtgtaccggaacacagaacagtaaatgttcgtgtcttcctggttggtattgcgctactgattcttcacagactgaagattgtcgagattgtataccaaaaaggagatgtccatgcggatactttggtggaatagatgaacaaggaaatcctatttgtaaatcgtgttgtgttggtgaatattgcgactacctacgtaattatagacttgatccatttcctccatgcaaactatctaaatgtaattaattatgattttgatgataatgttaccatacattatatcgctacttggttagtgtattattcagtatgaagacctattaataattacttatcttttgacgatcttgttataattataatataaaaatacttatggcatagtaactcataattgctgacgcgataaattcgtaataatctgttttgttcaaatttttataaggaatctacaggcataaaaataaaaatataatttataatatactcttacagcgcgccatcatgaataacagcagtgaattgattgctgttattaatggatttagaaatagtggacgattttgtgatattaatatagttattaatgatgaaaggataaacgctcacagactcatcctatctggagcctccgaatatttttccattctgttttccaataattttatcgattctaatgaatacgaagttaatctaagtcatttagattatcaaagtgttaacgatttgatcgattacatttatgggatacctttgagcctaactaacgataacgtgaaatatattctttcaaccgctgattttttacaaattggatctgctattacggagtgtgaaaattacatacttaaaaatctttgttctagaaactgtatcgatttctacatatacgctgataaatataataacaagaaaatagaatcagcgtcgtttaacacaatattacaaaatattttgagactcatcaacgatgaaaactttaaatacttaacagaggaatcaatgataaaaattttaagcgatgatatgttaaatataaaaaatgaggatttcgccccactaattctcattaaatggttagagagtactcaacaaccatgcaccgtcgagttacttaaatgcctcagaatatcattgctttccccacaagttataaaatcactttatagtcatcgactggttagttcaatctacgaatgtataacattcttaaacaatatagcattcttggatgaatcatttcctagataccatagcatcgagttgatatctatcggtataagtaattcgcatgataagatttccataaactgctacaatcataaaaaaaatacatgggaaatgatatcttcacgtagatataggtgtagtttcgcagtggccgtcctggataatattatctatatgatgggtggatatgatcagtccccgtatagaagttcaaaggttatagcgtacaatacatgtacaaattcttggatatatgatataccagagctaaaatatcctcgttctaattgtgggggactggctgatgacgaatacatttattgtataggcggcatacgcgatcaggattcatcgttgacatctagtattgatagatggaagccatcaaaaccatattggcagaagtatgctaaaatgcgcgaaccaaaatgtgatatgggggttgcgatgttaaacggattaatatatgttataggtggaatcgttaaaggtgacacgtgtaccgacgcactagagagtttatcagaagatggatggatgaagcatcaacgtcttccaataaaaatgtccaatatgtcgacgattgttcatgatggcaagatttatatatctggaggttacaacaatagtagtgtagttaatgtaatatcgaatctagtccttagctataattcgatatatgatgaatggaccaaattatcatcattaaacattcctagaattaatcccgctctatggtcagcgcataataaattatatgtaggaggaggaatatctgatgatgttcgaactaatacatctgagacatacgacaaagaaaaagattgttggacattggataatggtcacgtgttaccacgcaattatataatgtataaatgcgaaccgattaaacataaatatccattggaaaaaacacagtacacgaatgattttctaaagtatttggaaagttttataggtagttgatagaacaaaatacataattttgtaaaaataaatcactttttatactaatatgacacgattaccaatacttttgttactaatatcattagtatacgctacaccttttcctcagacatctaaaaaaataggtgatgatgcaactctatcatgtaatcgaaataatacaaatgactacgttgttatgagtgcttggtataaggagcccaattccattattcttttagctgctaaaagcgacgtcttgtattttgataattataccaaggataaaatatcttacgactctccatacgatgatctagttacaactatcacaattaaatcattgactgctagagatgccggtacttatgtatgtgcattctttatgacatcaactacaaatgacactgataaagtagattatgaagaatactccacagagttgattgtaaatacagatagtgaatcgactatagacataatactatctggatctacacattcaccggaaactagttctaagaaacctgattatatagataattctaattgctcgtcggtattcgaaatcggtacccggggatcagcttgcatgcctgcagcaattcccgaggctgtagccgacgatggtgcgccaggagagttgttgattcattgtttgcctccctgctgcggtttttcaccgaagttcatgccagtccagcgtttttgcagcagaaaagccgccgacttcggtttgcggtcgcgagtgaagatccctttcttgttaccgccaacgcgcaatatgccttgcgaggtcgcaaaatcggcgaaattccatacctgttcaccgacgacggcgctgacgcgatcaaagacgcggtgatacatatccagccatgcacactgatactcttcactccacatgtcggtgtacattgagtgcagcccggctaacgtatccacgccgtattcggtgatgataatcggctgatgcagtttctcctgccaggccagaagttctttttccagtaccttctctgccgtttccaaatcgccgctttggacataccatccgtaataacggttcaggcacagcacatcaaagagatcgctgatggtatcggtgtgagcgtcgcagaacattacattgacgcaggtgatcggacgcgtcgggtcgagtttacgcgttgcttccgccagtggcgcgaaatattcccgtgcaccttgcggacgggtatccggttcgttggcaatactccacatcaccacgcttgggtggtttttgtcacgcgctatcagctctttaatcgcctgtaagtgcgcttgctgagtttccccgttgactgcctcttcgctgtacagttctttcggcttgttgcccgcttcgaaaccaatgcctaaagagaggttaaagccgacagcagcagtttcatcaatcaccacgatgccatgttcatctgcccagtcgagcatctcttcagcgtaagggtaatgcgaggtacggtaggagttggccccaatccagtccattaatgcgtggtcgtgcaccatcagcacgttatcgaatcctttgccacgcaagtccgcatcttcatgacgaccaaagccagtaaagtagaacggtttgtggttaatcaggaactgttcgcccttcactgccactgaccggatgccgacgcgaagcgggtagatatcacactctgtctggcttttggctgtgacgcacagttcatagagataaccttcacccggttgccagaggtgcggattcaccacttgcaaagtcccgctagtgccttgtccagttgcaaccacctgttgatccgcatcacgcagttcaacgctgacatcaccattggccaccacctgccagtcaacagacgcgtggttacagtcttgcgcgacatgcgtcaccacggtgatatcgtccacccaggtgttcggcgtggtgtagagcattacgctgcgatggattccggcatagttaaagaaatcatggaagtaagactgctttttcttgccgttttcgtcggtaatcaccattcccggcgggatagtctgccagttcagttcgttgttcacacaaacggtgatacgtacacttttcccggcaataacatacggcgtgacatcggcttcaaatggcgtatagccgccctgatgctccatcacttcctgattattgacccacactttgccgtaatgagtgaccgcatcgaaacgcagcacgatacgctggcctgcccaacctttcggtataaagacttcgcgctgataccagacgttgcccgcataattacgaatatctgcatcggcgaactgatcgttaaaactgcctggcacagcaattgcccggctttcttgtaacgcgctttcccaccaacgctgatcaattccacagttttcgcgatccagactgaatgcccacaggccgtcgagttttttgatttcacgggttggggtttctacaggacgtaacattctagtcgaggaattcatttatagcatagaaaaaaacaaaatgaaattctactatatttttacatacatatattctaaatatgaaagtggtgattgtgactagcgtagcatcgcttctagacatctatatactatatagtaataccaatactcaagactacgaaactgatacaatctcttatcatgtgggtaatgttctcgatgtcgatagccatatgcccggtagttgcgatatacataaactgatcactaattccaaacccacccgctttttatagtaagtttttcacccataaataataaatacaataattaatttctcgtaaaagtagaaaatatattctaatttattgcacggtaaggaagtagaatcataaagaacagtgacggatccccgatccccgacctgcaggcatgcaagctcgactccggaaccaattactgataatgtagaagatcatacagacaccgtcacatacactagtgatagcattaatacagtaagtgcatcatctggagaatccacaacagacgagactccggaaccaattactgataaagaagatcatacagttacagacactgtctcatacactacagtaagtacatcatctggaattgtcactactaaatcaaccaccgatgatgcggatctttatgatacgtacaatgataatgatacagtaccaccaactactgtaggcggtagtacaacctctattagcaattataaaaccaaggactttgtagaaatatttggtattaccgcattaattatattgtcggccgtggcaattttctgtattacatattatatatataataaacgttcacgtaaatacaaaacagagaacaaagtctagatttttgacttacataaatgtctgggatagtaaaatctatcatattgagcggaccatctggtttaggaaagacagccatagccaaaagactatgggaatatatttggatttgtggtgtcccataccactagatttcctcgtcctatggaacgagaaggtgttgattaccattacgttaacagagaggccatctggaagggaatagccgccggaaactttctagaacatactgagtttttaggaaatatttacggaacttctaaaacagctgtgaatacagcggctattaataatcgtatttgtgtgatggatctaaacatcgacggtgttagaagtcttaaaaatacgtacctaatgccttactcggtgtatataagacctacctctcttaaaatggttgagaccaagcttcgtcgtagaaacactgaagctaacgatgagattcatcgtcgtgtgatgttggcaaaaactgacatggatgaggcaggtgaagccggtctattcgacactattatcattgaagatgatgtgaatttagcatatagtaagttaattcagatactacaggaccgtattagaatgtattttaacactaattagagacttaagacttaaaacttgataattaataatataactcgtttttatatgtgtctatttcaacgtctaatgtattagttaaatattaaaacttaccacgtaaaacttaaaatttaaaatgatatttcattgacagatagatcacacattatgaactttcaaggacttgtgttaactgacaattgcaaaaatcaatgggtcgttggaccattaataggaaaaggtggattcggtagtatttatactactaatgacaataattatgtagtaaaaatagagcccaaagctaacggatcattatttaccgaacaggcattttatactagagtacttaaaccatccgttatcgaagaatggaaaaaatctcacaatataaagcacgtaggtcttatcacgtgcaaggcatttggtctatacaaatccattaatgtggaatatcgattcttggtaattaatagattaggtgcagatctagatgcggtgatcagagccaataataatagactaccaaaaaggtcggtgatgttgatcggaatcgaaatcttaaataccatacaatttatgcacgagcaaggatattctcacggagatattaaagcgagtaatatagtcttagatcaaatagataagaataaattatatctagtggattacggattggtttctaaattcatgtctaatggcgaacatgttccatttataagaaatccaaataaaatggataacggtactctagaatttacacctatagattcgcataaaggatacgttgtatctagacgtggagatctagaaacacttggatattgtatgattagatggttgggaggtatcttaccatggactaagatatctgaaacaaagaattgtgcattagtaagtgccacaaaacagaaatatgttaacaatactgcgactttgttaatgaccagtttgcaatatgcacctagagaattgctgcaatatattaccatggtaaactctttgacatattttgaggaacccaattacgacaagtttcggcacatattaatgcagggtgtatattattaagtgtggtgtttggtcgataaaaattaaaaaataacttaatttattattgatctcgtgtgtacaaccgaaatcatggcgatgttttacgcacacgctctcggtgggtacgacgagaatcttcatgcctttcctggaatatcatcgactgttgccaatgatgtcaggaaatattctgttgtgtcagtttataataacaagtatgacattgtaaaagacaaatatatgtggtgttacagtcaggtgaacaagagatatattggagcactgctgcctatgtttgagtgcaatgaatatctacaaattggaaatccgatccatgatcaagaaggaaatcaaatctctatcatcacatatcgccacaaaaactactatgctctaagcggaatcgggtacgagagtctagacttgtgtttggaaggagtagggattcatcatcacgtacttgaaacaggaaacgctgtatatggaaaagttcaacatgattattctactatcaaagagaaggccaaagaaatgagtgcacttagtccaggacctatcatcgattaccacgtctggataggagattgtatctgtcaagttactgctgtggacgtacatggaaaggaaattatgaaaatgagattcaaaaagggtgcggtgcttccgatcccaaatctggtaaaagttaaacttggggagaatgatacagaaaatctttcttctactatatcggcggcaccatcgaggtaaccacctctctggaagacagcgtgaatcatgtactcatgaaacgtttggaaactatacgccatatgtggtctgttgtatatgatcattttgatattgtgaatggtaaagaatgctgttatgtgcatacgcattcatctaatcaaaatcctataccgagtactgtaaaaacaaatttgtacatgaagactatgggatcatgcattcaaatggattccatggaagctctagagtatcttagcgaactgaaggaatcaggtggatggagtcccagaccagaaatgcaggaatttgaatatccagatggagtggaagacactgaatcaattgagagattggcagaggagttcttcaatagatcagaacttcaggctggtgaatcagtcaaatttggtaattctattaattgttaaacatacatctgtttcagctaagcaactaagaacacgtatacggcagcagcttccttctatactctcatcttttaccaacacaaagggtggatatttgttcattggagttgataataatacacacaaagtatttggattcacggtgggttacgactacctcagactgatagagaatgatatagaaaagcatatcaaaagacttcgtgttgtgcatttctgtgagaagaaagaggacatcaagtacgcgtgtcgattcatcaaggtatataaacctggggatgagactacctcgacatacgtgtgcgctatcaaagtggaaagatgctgttgtgctgtgtttgcagattggccagaatcatggtatatggatactaatggtatcaagaagtattctccagatgaatgggtgtcacatataaaattttaattaatgtaactatagagaacaaataataaggttgtaatatcatatagacaataactaacaattaattagtaactgttatctcttttttaactaaccaactaactatatacctattaatacatcgtaattatagttcttaacatctattaatcattaattcgcttctttaattttttataaactaacattgttaattgaaaagggataacatgttacagaatataaattatatatggatttttttaaaaaggaaatacttgactggagtatatatttatctcttcattatatagcacgcgtgttttccaatttttccacatcccatataatacaggattataatctcgttcgaacatacgagaaagtggataaaacaatagttgattttttatctaggttgccaaatttattccatattttagaatatggggaaaatattctacatatttattctatggatgatgctaatacgaatattataattttttttctagatagagtattaaatattaataagaacgggtcatttatacacaatctcgggttatcatcatccattaatataaaagaatatgtatatcaattagttaataatgatcatccagataataggataagactaatgcttgaaaatggacgtagaacaagacattttttgtcctatatatcagatacagttaatatctatatatgtattttaataaatcatggattttatatagatgccgaagacagttacggttgtacattattacatagatgtatatatcactataagaaatcagaatcagaatcatacaatgaattaattaagatattgttaaataatggatcagatgtagataaaaaagatacgtacggaaacacaccttttatcctattatgtaaacacgatatcaacaacgtggaattgtttgagatatgtttagagaatgctaatatagactctgtagactttaatagatatacacctcttcattatgtctcatgtcgtaataaatatgattttgtaaagttattaatttctaaaggagcaaatgttaatgcgcgtaataaattcggaactactccattttattgtggaattatacacggtatctcgcttataaaactatatttggaatcagacacagagttagaaatagataatgaacatatagttcgtcatttaataatttttgatgctgttgaatctttagattatctattatccagaggagttattgatattaactatcgtactatatacaacgaaacatctatttacgacgctgtcagttataatgcgtataatacgttggtctatctattaaacaaaaatggtgattttgagacgattactactagtggatgtacatgtatttcggaagcagtcgcaaacaacaacaaaataataatggaagtactattgtctaaacgaccatctttgaaaattatgatacagtctatgatagcaattactaaacataaacagcataatgcagatttattgaaaatgtgtataaaatatactgcgtgtatgaccgattatgatactcttatagatgtacagtcgctacagcaatataaatggtatattttaagatgtttcgatgaaatagatatcatgaagagatgttatataaaaaataaaactgtattccaattagttttttgtatcaaagacattaatactttaatgagatacggtaaacatccttctttcgtgaaatgcactagtctcgacgtatacggaagtcgtgtacgtaatatcatagcatctattagatatcgtcagagattaattagtctattatccaagaagctggatcctggagataaatggtcgtgttttcctaacgaaataaaatataaaatattggaaaactttaacgataacgaactatccacatatctaaaaatcttataaacattattaaaatataaaatctaagtaggataaaatcacactacatcattgtttccttttagtgctcgacagtgtatactatttttaacgctcataaataaaaatgaaaacgatttccgttgttacgttgttatgcgtactacctgctgttgtttattcaacatgtactgtacccactatgaataacgctaaattaacgtctaccgaaacatcgtttaatgataaccagaaagttacgtttacatgtgatcagggatatcattctttggatccaaatgctgtctgtgaaacagataaatggaaatacgaaaatccatgcaaaaaaatgtgcacagtttctgattatgtctctgaactatataataaaccgctatacgaagtgaattccaccatgacactaagttgcaacggcgaaacaaaatattttcgttgcgaagaaaaaaatggaaatacttcttggaatgatactgttacgtgtcctaatgcggaatgtcaacctcttcaattagaacacggatcgtgtcaaccagttaaagaaaaatactcatttggggaatatatgactatcaactgtgatgttggatatgaggttattggtgcttcgtacataagttgtacagctaattcttggaatgttattccatcatgtcaacaaaaatgtgatatgccgtctctatctaacggattaatttccggatctacattttctatcggtggcgttatacatcttagttgtaaaagtggttttacactaacggggtctccatcatccacatgtatcgacggtaaatggaatcccatactcccaatatgtgtacgaactaacgaaaaatttgatccagtggatgatggtcccgacgatgagacagatttgagcaaactctcgaaagacgttgtacaatatgaacaagaaatagaatcgttagaagcaacttatcatataatcatagtggcgttgacaattatgggcgtcatatttttaatctccgttatagtattagtttgttcctgtgacaaaaataatgaccaatataagttccataaattgctaccgtaaatataaatccgttaaaataattaataatttaataacaaacaagtatcaaaagattaaagacttatagctagaatcaattgagatgtcttcttcagtggatgttgatatctacgatgccgttagagcatttttactcaggcactattataacaagagatttattgtgtatggaagaagtaacgccatattacataatatatacaggctatttacaagatgcgccgttataccgttcgatgatatagtacgtactatgccaaatgaatcacgtgttaaacaatgggtgatggatacacttaatggtataatgatgaatgaacgcgatgtttctgtaagcgttggcaccggaatactattcatggaaatgtttttcgattacaataaaaatagtatcaacaatcaactaatgtatgatataattaatagcgtatctataattctagctaatgagagatatagaagcgcttttaacgacgatggtatatacatccgtagaaatatgattaacaagttgtacggatacgcatctctaactactattggcacgatcgctggaggtgtttgttattatctgttgatgcatctagttagtttgtataaataattatttcaatatactagttaaaattttaagattttaaatgtataaaaaactaataacgtttttatttgtaataggtgcattagcatcctattcgaataatgagtacactccgtttaataaactgagtgtaaaactctatatagatggagtagataatatagaaaattcatatactgatgataataatgaattggtgttaaattttaaagagtacacaatttctattattacagagtcatgcgacgtcggatttgattccatagatatagatgttataaacgactataaaattattgatatgtataccattgactcgtctactattcaacgcagaggtcacacgtgtagaatatctaccaaattatcatgccattatgataagtacccttatattcacaaatatgatggtgatgagcgacaatattctattactgcagagggaaaatgctataaaggaataaaatatgaaataagtatgatcaacgatgatactctattgagaaaacatactcttaaaattggatctacttatatatttgatcgtcatggacatagtaatacatattattcaaaatatgatttttaaaaatttaaaatatattatcacttcagtgacagtagtcaaataacaaacaacaccatgagatatattataattctcgcagttttgttcattaatagtatacatgctaaaataactagttataagtttgaatccgtcaattttgattccaaaattgaatggactggggatggtctatacaatatatcccttaaaaattatggcatcaagacgtggcaaacaatgtatacaaatgtaccagaaggaacatacgacatatccgcatttccaaagaatgatttcgtatctttctgggttaaatttgaacaaggcgattataaagtggaagagtattgtacgggactatgcgtcgaagtaaaaattggaccaccgactgtaacattgactgaatacgacgaccatatcaatttgtacatcgagcatccgtatgctactagaggtagcaaaaagattcctatttacaaacgcggtgacatgtgtgatatctacttgttgtatacggctaacttcacattcggagattctaaagaaccagtaccatatgatatcgatgactacgattgcacgtctacaggttgcagcatagactttgtcacaacagaaaaagtgtgcgtgacagcacagggagccacagaagggtttctcgaaaaaattactccatggagttcgaaagtatgtctgacacctaaaaagagtgtatatacatgcgcaattagatccaaagaagatgttcccaatttcaaggacaaaatggccagagttatcaagagaaaatttaatacacagtctcaatcttatttaactaaatttctcggtagcacatcaaatgatgttaccacttttcttagcatgcttaacttgactaaatattcataactaatttttattaatgatacaaaaacgaaataaaactgcatattatacactggttaacgcccttataggctctaaccattttcaagatgaggtccctgattatagtccttctgttcccctctatcatctactccatgtctattagacgatgtgagaagactgaagaggaaacatggggattgaaaatagggttgtgtataattgccaaagatttctatcccgaaagaactgattgcagtgttcatctcccaactgcaagtgaaggattgataactgaaggcaatggattcagggatatacgaaacaccgataaattataaaaaaagcaatgtgtccgctgtttccgttaataatactattttcgtaactggcggattattcataaataactctaatagcacgatcgtggttaacaatatggaaaaacttgacatttataaagacaaacaatggtcgattatagaaatgcctatggctagggtatatcacggcattgactcgacatttggaatgttatattttgccggaggtctatccgttaccgaacaatatggtaatttagagaaaaacaacgagatatcttgttacaatcctagaacgaataagtggtttgatatttcatatactatttataagatatccatatcatcattgtgtaaactaaataacgtcttctatgtatttagtaaggacattggatatgtggaaaagtatgatggtgcatggaagttagtacatgatcgtctccccgctataaaggcattatcaacttctccttattgattgaaaatgaaaatataaatagtttttatgtatagcagtattaccctatagttttattgcttactactaacatggatacagatgttacaaatgtagaagatatcataaatgaaatagatagagagaaagaagaaatactaaaaaatgtagaaattgaaaataataaaaacattaacaagaatcatcccaatgaatatattagagaagcactcgttattaataccagtagtaatagtgattccattgataaagaagttatagaatgtatcagtcacgatgtaggaatatagatcatatctactaatttttataatcgatacaaaacataaaaaacaactcgttattacatagcaggcatggaatccttcaagtattgttttgataacgatggcaagaaatggattatcggaaatactttatattctggtaattcaatactctataaggtcagaaaaaatttcactagttcgttctacaattacgtaatgaagatagatcacaaatcacacaagccattgttgtctgaaatacgattctatatatctgtattggatcctttgactatcgacaactggacacgggaacgtggtataaagtatttggctattccagatctgtatggaattggagaaaccgatgattatatgttcttcgttataaagaattcgggaagagtattcgccccaaaggatactgaatcagtcttcgaagcatgcgtcactatgataaacacgttagagtttatacactctcgaggatttacccatggaaaaatagaaccgaggaatatactgattagaaataaacgtctttcactaattgactattctagaactaacaaactatacaagagtggaaactcacatatagattacaacgaggacatgataacttcaggaaatatcaattatatgtgtgtagacaatcatcttggagcaacagtttcaagacgaggagatttagaaatgttgggatattgcatgatagaatggttcggtggcaaacttccatggaaaaacgaaagtagtataaaagtaataaaacaaaaaaaagaatataaaaaatttatagctactttctttgaggactgttttcctgaaggaaatgaacctctggaattagttagatatatagaattagtatacacgttagattattctcaaactcctaattatgacagactacgtaaactgtttatacaagattgaaattatattcttttttttatagagtgtggtagtgttacggatatctaatattaatattagactatctctatcgcgctacacgaccaatatcgattactatggatatcttctatgaaaggagagaatgtatttatttctccagcgtcaatctcgtcagtattgacaatactgtattatggagctaatggatccactgctgaacagctatcaaaatatgtagaaacggaggagaacacggataaggttagcgctcagaatatctcattcaaatccatgaataaagtatatgggcgatattctgccgtgtttaaagattcctttttgagaaaaattggcgataagtttcaaactgttgacttcactgattgtcgcactatagatgcaatcaacaagtgtgtagatatctttactgaggggaaaatcaatccactattggatgaaccattgtctcctagcaattagtgccgtatactttaaagcaaaatggttgacgccattcgaaaaggaatttaccagtgattatcccttttacgtatctccgacggaaatggtagacgtaagtatgatgtctatgtacggcaaggcatttaatcacgcatctgtaaaagaatcattcggcaacttttcaatcatagaactgccatatgttggagatactagtatgatggtcattcttccagacaagattgatggattagaatccatagaacaaaatctaacagatacaaattttaagaaatggtgtgactttatggatgctatgtttatagatgttcacattcccaagtttaaggtaacaggctcgtataatctggtggatactctagtaaagtcaggactgacagaggtgttcggttcaactggagattatagcaatatgtgtaatttagatgtgagtgtcgacgctatgatccacaaaacgtatatagatgtcaatgaagagtatacagaagcagctgcagcaacttctgtactagtggcagactgtgcatcaacaattacaaatgagttctgtgcagatcatccgttcatctatgtgattaggcatgttgatggaaaaattcttttcgttggtagatattgctctccgacaactaattgttaaccattttttttaaaaaaaatagaaaaaacatgtggtattagtgcaggtcgttgttcttccaattgcaattggtaagatgacggccaactttagtacccacgtcttttcaccacagcactgtggatgtgacagactgaccagtattgatgacgtcaaacaatgtttgactgaatatatttattggtcgtcctatgcataccgcaacaggcaatgcgctggacaattgtattccacactcctctcttttagagatgatgcggaattagtgttcatcgacattcgcgagctggtaaaaaatatgccgtgggatgatgtcaaagattgtacagaaatcatccgttgttatataccggatgagcaaaaaaccatcagagagatttcggccatcatcggactttgtgcatatgctgctacttactggggaggtgaagaccatcccactagtaacagtctgaacgcattgtttgtgatgcttgagatgctaaattacgtggattataacatcatattccggcgtatgaattgatgagttgtacatcttgacattttctttcttctcttctccctttcttctcttctcccttcctccctcttctccctttcccagaaacaaacttttttacccactataaaataaaatgagtatactacctattatatttcttcctatatttttttattcttcattcgttcagacttttaacgcgtctgaatgtatcgacaaagggcaatattttgcatcattcatggagttagaaaacgagccagtaatcttaccatgtcctcaaataaatacgctatcatccggatataatatattagatattttatgggaaaaacgaggagcggataatgatagaattataccgatagataatggtagcaatatgctaattctgaacccgacacaatcagactctggtatttatatatgcattaccacgaacgaaacctactgtgacatgatgtcgttaaatttgacaatcgtgtctgtctcagaatcaaatatagatcttatctcgtatccacaaatagtaaatgagagatctactggcgaaatggtatgtcccaatattaatgcatttattgctagtaacgtaaacgcagatattatatggagcggacatcgacgccttagaaataagagacttaaacaacggacacctggaattattaccatagaagatgttagaaaaaatgatgctggttattatacatgtgttttagaatatatatacggtggcaaaacatataacgtaaccagaattgtaaaattagaggtacgggatagaataataccttctactatgcaattaccagatggcattgtaacttcaataggtagtaatttgactattgcatgcagagtatcgttgagacctcccacaacggacaccgacgtcttttggataagtaatggtatgtattacgaagaagatgatggggacggaaacggtagaataagtgtagcaaataaaatctatatgaccgataagagacgtgttattacatcccggttaaacattaatcctgtcaaggaagaagatgctacaacgtttacgtgtatggcgtttactattcctagcatcagcaaaacagttactgttagtataacgtgaatgtatgttgttacatttccatgtcaattgagtttataagaatttttatacattatcttccaacaaacaattgacgaacgtattgctatgattaactcccacgatactatgcatattattaatcattaacttgcagactatacctagtgctattttgacatactcgtgttcttgtgtaattgcggtatctatattattaaagtacgtaaatctagctatagttttattatttaattttagataatataccgtctccttatttttaaaaattgccacatcctttattaaatcatgaatgggaatttctatgtcatcgttagtatattgtgaacaacaagagcagatatctataggaaagggtggaatgcgatacattgatctatgtagttttaaaacacacgcgaactttgaagaatttatataaatcattccatcgatacatccttctatgttgacatgtatatatccaggaattcttttattaatgtcaggaaatgtataaactaaaacattgcccgaaagcggtgcctctatctgcgttatatccgttcttaacttacaaaatgtaaccaatacctttgcatgacttgttttgttcggcaacgttagtttaaacttgacgaatggattaattacaatagcatgatccgcgcatctattaagtttttttactttaacgcccttgtatgtttttacagagactttatctaaatttctagtgcttgtatgtgttataaatataacgggatatagaaccgaatcacctaccttagatacccaattacattttatcagatccagataataaacaaattttgtcgccctaactaattctatattgttatatattttacaattggttatgatatcatgtaataacttggagtctaacgcgcatcgtcgtacgtttatacaattgtgatttagtgtagtatatctacacatgtatttttccgcactatagtattctggactagtgataaaactatcgttatatctgtcttcaatgaactcatcgagatattgctctctgtcatattcatacacctgcataaactttctagacatcttacaatccgtgttattttaggatcatatttacatatttacgggtatatcaaagatgttagattagttaatgggaatcgtctataataatgaatattaaacaattatatgaggacttttaccacaaagcatcataaaaatgagtcgtcgtctgatttatgttttaaatatcaaccgcaaatcaactcataaaatacaagagaatgaaatatatacatattttagtcattgcaatatagaccatacttctacagaacttgattttgtagttaaaaactatgatctaaacagacgacaacctgtaactgggtatactgcactacactgctatttgtataataattactttacaaacgatgtactgaagatattattaaatcatgacgtaaatgtaacgatgaaaaccagtagcggacgtatgcctgtttatatattgcttactagatgttgtaatatttcacatgatgtagtgatagatatgatagacaaagataaaaaccacttattacatagagactattccaacctattactagagtatataaaatctcgttacatgttattgaaggaagaggatatcgatgagaacatagtatccactttattagataagggaatcgatcctaactttaaacaagacggatatacagcgttacattattattatttgtgtctcgcacacgtttataaactaggtgagtgtagaaaaccgataacgataaaaaaggccaagcgaattatttctttgtttatacaacatggagctaatctaaacgcgttagataattgtggtaatacaccattccatttgtatcttagtattgaaatgtgtaataatattcatatgactaaaatgctgttgacttttaatccgaatttcaaaatatgtaataatcatggattaacgcctatactatgttatataacttccgactacatacaacacgatattcttgttatgttaatacatcactatgaaacaaatgttggagaaatgccgatagatgagcgtcgtatgatcgtattcgagtttatcaaaacatattctacacgtccggcagattcgataacttatttgatgaataggtttaaaaatataaatatttatacccgctatgaaggaaagacattattacacgtagcatgtgaatataataatacacaagtaatagattatcttatacgtatcaacggagatataaatgcgttaaccgacaataacaaacacgctacacaactcattatagataacaaagaaaattccccatataccattaattgtttactgtatatacttagatatattgtagataagaatgtgataagatcgttggtggatcaacttccatctctacctatcttcgatataaaatcatttgagaaattcatatcctactgtatacttttagatgacacattttacgataggcacgttaagaatcgcgattctaaaacgtatcgatacgcattttcaaaatacatgtcgtttgataaatacgatggtataataactaaatgtcacgacgaaacaatgttactcaaactgtccactgttctagacactacactatatgcagttttaagatgtcataattcgagaaagttaagaagatacctcaacgagttaaaaaaatataataacgataagtcctttaaaatatattctaatattatgaatgagagataccttaatgtatattataaagatatgtacgtgtcaaaggtatatgataaactatttcctgttttcacagataaaaattgtctactaacattactaccttcagaaattatatacgaaatattatacatgctgacaattaacgatctttataatatatcgtatccacctaccaaagtatagttgtatttttctcatgcgatgtgtgtaaaaaaactgatattatataaatattttagtgccgtataataaagatgacgatgaaaatgatggtacatatatatttcgtatcattattgttattgctattccacagttacgccatagacatcgaaaatgaaatcacagaattcttcaataaaatgagagatactctaccagctaaagactctaaatggttgaatccagcatgtatgttcggaggcacaatgaatgatatagccgctctaggagagccattcagcgcaaagtgtcctcctattgaagacagtcttttatcgcacagatataaagactatgtggttaaatgggagaggctagaaaagaatagacggcgacaggtttctaataaacgtgttaaacatggtgatttatggatagccaactatacatctaaattcagtaaccgtaggtatttgtgcaccgtaactacaaagaatggtgactgtgttcagggtatagttagatctcatattaaaaaacctccttcatgcattccaaaaacatatgaactaggtactcatgataagtatggcatagacttatactgtggaattctttacgcaaaacattataataatataacttggtataaagataataaggaaattaatatcgacgacattaagtattcacaaacgggaaaggaattaattattcataatccagagttagaagatagcggaagatacgactgttacgttcattacgacgacgttagaatcaagaatgatatcgtagtatcaagatgtaaaatacttacggttataccgtcacaagaccacaggtttaaactaatactagatccgaaaatcaacgtaacgataggagaacctgccaatataacatgcactgctgtgtcaacgtcattattgatcgacgatgtactgattgaatgggaaaatccatccggatggcttataggattcgattttgatgtatactctgttttaactagtagaggcggtatcaccgaggcgaccttgtactttgaaaatgttactgaagaatatataggtaatacatataaatgtcgtggacacaactattattttgaaaaaacccttacaactacagtagtattggagtaaatatacaatgcatttttatatacattactgaattattattactgaattattattactgaattattattaattatatcgtatttgtgctatagaatggatgaagatacgcgactatctaggtatttgtatctcaccgatagagaacatataaatgtagactctattaaacagttgtgtaaaatatcagatcctaatgcatgttatagatgtggatgtacggctttacatgagtacttttataattatagatcagtcaacggaaaatacaagtatagatacaacggttactatcaatattattcatctagcgattatgaaaattataatgaatattattatgatagaactggtatgaacagtgagagtgataatatatcaatcaaaacagaatatgaattctatgatgaaacacaagatcaaagtacacaactagtaggttacgacattaaactcaaaaccaatgaggatgattttatggctatgatagatcagtgggtgtccatgattatatagatgaatcaattaataaagtagtatatggaagagagtctcacgtaagatggcgggatatatggcaagaacataatgatggcgtatacagtataggaaaggagtgcatagataatatatacgaagacaaccataccgtagacgaattctacaagatagacagcgtatcagatgtagatgacgcggaacacatatctccgataactaaaaaaccatagaatcagttgatgataatacctacatttctaatcttccgtataccatcaaatacaaaatattcgagcaacaataagtattttttatacctttaaaactgataaataaattttttctagtgatattttggcaagatgagaatcctatttctcatcgctttcatgtatgggtgtgttcactcatatgttaacgcggttgaaaccaaatgtccaaatctagacattgtaacatcttctggagaatttcattgttcaggatgtgtggaacatatgcctgagtttagctatatgtattggttggcaaaggatatgaaatcggacgaggataccaagtttatagaacatctgggtgatggcatcaaagaagatgaaaccgttcgtaccacagatagtggaatcgtcactctacgtaaagtccttcatgtgactgatactaataaatttgataattataggttcacttgtgtcctcgctacgctagatggcatttataaaaagaatgtttgctgaagtagttgtgtgctactatttttatttatgatataatctaatggaattaatttgaattgatatttatccaatactaaagattatattagaatcaaattaatcttttatacgagaaaaaataacgacatacgtcgtcaacaaattaaactttttatttattagttaactagcttatagaacttgctcattgttatgtttctaaaacgggtacggcatataggacaattatccgacgcaccggtttctcttcgtgttctatgccatatattgatgcatgttatgcaaaatatatgagtacacgaatccaataaaccaaagtatctatcgttttgagtaaacaacttcatagcaaattccacattctttttctttacttactctatacacgtcctcgtatttatttagtattttgatgatatccaactcagaaatggttgttgtattattgggtgtatttggagtataggtattattagctatgtaccaatttaccaaccctcttaatattgattgataatcacatcggttatccaattaataactaaattgtagtgtatatatagaccatatatgtttctatttttttgacagttacgtatagtttcagtaagttttgattgttgtattcctgtatctctagataagttagtcatatagtcccttccggcgatacgttttttccaagcccgaaattgattagccaaatgtgtatttatttttgtgatattgatataatatttcggataatgcatactgttagtcttatatcatttggttcatctatgtattgtaatattgttacatgatctatagatgatgtattgattttggcaggatcgaattccatatccgcgactaaacagtgaaaaaaatgtaaatactttttaaattttaaattagtaaaacttttttttattttttatgattccaaaaatactgaatacaaagtcctaaattataaatatggagatcatactaccacaacttattattatgtatacaaggccggtgtaatagatagatatatataattctattacaccggcagacaattaccgaccggtatttgtcgttaccaacataccgtataatatgtaatatacaattccataacccattgacagttgttatacatcaaaattgcaattcttttgattacgatgttataagaatgtagttaattgatgtatgatgttaatgtgtcctctttcctcttataacatcgtaatcaaaaacttttttataatatatacctaataatgtgtcttaatagttctcgtgattcgtcaaacaatcattcttataaaatataataaagcaacgtaaaaacacataaaaataagcgtaactaataagacaatggatatttacgacgataaaggtctacagactattaaactgtttaataatgaatttgattgtataaggaatgacatcagagaattatttaaacatgtaactgattccgatagtatacaacttccgatggaagacaattctgatattatagaaaatatcagaaaaatactatatagacgattaaaaaatgtagaatgtgttgacatcgataacacaataacttttatgaaatacgatccaaatgatgataataagcgtacgtgttctaattgggtacccttaactaataactatatggaatattgtctagtaatatatttggaaacaccgatatgtggaggcaaaataaaattataccaccctacaggaaatataaagtcggataaggatattatgtttgcaaagactctagactttaaatcaacgaaagtgttaactggacgtaaaacaattgccgttctagacatatccgtttcatataatagatcaatgactactattcactacaacgacgacgttgatatagatatacatactgataaaaatggaaaagagttatgttattgttatataacaatagatgatcattacttggttgatgtggaaactataggagttatagtcaatagatctggaaaatgtctgttagtaaataaccatctaggtataggtatcgttaaagataaacgtataagcgatagttttggagatgtatgtatggatacaatatttgacttttctgaagcacgagagttattttcattaactaatgatgataacaggaatatagcatgggacactgataaactagacgatgatacagatatatggactcccgtcacagaagatgattacaaatttctttctagactagtattgtatgcaaaatctcaatcggatactgtatttgactattatgttcttactggtgatacggaaccacccactgtattcattttcaaggtaactagattttactttaatatgccgaaataaaaaatttttgtataatatctagaggtagaggtattgtttagataaatacaaataacatagatacatcgcatacttagcatttttataaatatacataagacatacactttatacatttttgtaaaaatactcataaaaaaatttataaaaattatggcacaaccatatcttgtataggtagtttagttcgtcgagtgaacctataaacagataatagacaacacataataatgcctactaatacaagcataataccgggagatgggatatatgacgttgtagtgtttgggttttctgaacgttgatagtctactaatactacatgctgacatctaatgcctgtataaccatgagagcatctacaatacataccgtcaatatctctagcgtggatacagtcaccgtgtaaacaatatccatctccctctggaccgcataatctgatagctggaatatctgttgtagcgtttgtaatttctggcaatgtcgtttcgatagcgttaccactatcggcgaatgatctgattatcatagcagcgaacaacaacatcagataatttatcaacatttttgatggattctgtgtttatgctgtttctcagtgtgtgtttatgacaagattgggaattttatattattaattcagtaatataaactaataatatattgttaattgtgtaaataatataaaaataacaatacaatattgaatgtgttgctgttaaaaatgtatgtgttaatataatagaataaaataaatgagtatgatcattttagataacgattgattttatcattaccgcttcattcttatattctttgcttacggaacctatatttagaaacatctactaacaattttttatgcttgcattattaatggtatgtaatatgattgattgtgtacgcaataccaatttgttaagtatgaatacggggtacaaacataaattgaaatttaacattatttatttatgatatatatcgttatcgttaggtctataccatggatatctttaaagaactaatcttaaaacaccctgatgaaaatgttttgatttctccagtttccattttatctactttatctattctaaatcatggagcagctggttctacagctgaacaactatcaaaatatatagagaatatgaatgagaatacacccgatgacaataatgatgacatggaggtagatattccgtattgtgcgacactagctaccgcaaataaaatatacggtagcgatagtatcgagttccacgcctccttcctacaaaaaataaaagacgattttcaaactgtaaactttaataatgctaaccaaacaaaggaactaatcaacgaatgggttaagacaatgacaaatggtaaaattaattccttattgactagtccgctatccattaatactcgtatgacagttgttagcgccgtccattttaaagcaatgtggaaatatccattttctaaacatcttacatatacagacaagttttatatttctaagaatatagttaccagcgttgatatgatggtgggtaccgagaataacttgcaatatgtacatattaatgaattattcggaggattctctattatcgatattccatacgagggaaactctagtatggtaattatactaccggacgacatagaaggtatatataacatagaaaaaaatataacagatgaaaaatttaaaaaatggtgtggtatgttatctactaaaagtatagacttgtatatgccaaagtttaaagtggaaatgacagaaccgtataatctggtaccgattttagaaaatttaggacttactaatatattcggatattatgcagattttagcaagatgtgtaatgaaactatcactgtagaaaaatttctacatacgacgtttatagatgttaatgaggagtatacagaagcatcggccgttacaggagtatttacgattaacttttcgatggtatatcgtacgaaggtctacataaaccatccattcatgtacatgattaaagacaccacaggacgtatactttttatagggaaatactgctatccgcaataaatataaacaaatagacttttataaagagtcttcaacgataagtatatcgacatactacttatgctgcgaaagattctgaacgagaacgactatctcaccctcttggatcatatccgcactgctaaatactaaatctccactacactttttatcatcttatgaggaatgattgccttcgtgaaataggaataattagcaccagaatagctatggattattgtggtagagagtgcactattctatgtcgtctactggatgaagatgtgacgtacaaaaaaataaaactagaaattgaaacgtgtcacaacttatcaaaacatatagatagacgaggaaacaatgcgctacattgttacgtctccaataaatgcgatacagacattaagattgttctctcgcggagtcgagagactttgtagaaacaacgaaggattaactccgctaggagtatacagtaagcatagatacgtaaaatctcagattgtgcatctactgatatccagctattcaaattcctctaacgaactcaagtcgaatataaatgatttcgatctgtattcggataatatcgacttacgtctgctaaaatacctaattgtggataaacggatacgtccgtccaagaatacgaattatgcaatcaatggtctcggattggtggatatatacgtaacgacgcctaatccgagaccagaagtattgctatggcttcttaaatcagaatgttacagcaccggttacgtatttcgtacctgtatgtacgacagtgatatgtgtaagaactctcttcattactatatatcgtctcatagagaatctcaatctctatccaaggatgtaattaaatgtttgatcgataacaatgtttccatccatggcagagacgaaggaggatctttacccatccaatactactggtctttctcaaccatagatatagagattgttaaattattattaataaaggatgtggacacgtgtagagtatacgacgtcagccctatattagaggcgtattatctaaacaagcgatttagagtaaccccatataatgtagacatggaaatcgttaatcttcttattgagagacgtcatactcttgtcgacgtaatgcgtagtattacttcgtacgattccagagaatataaccactacatcatcgataacattctaaagagatttagacaacaggatgaatccatcgtacaagccatactgataaactacttacattacggcgatatggtcgttcgatgcatgttagataacggacaacaactatcctctacacgactactttgttaataataatctcgtcgatgtaaacgtcgtaaggtttatcgtggaaaatatggacacgcggctgtaaatcacgtatcgaacaatggccgtctatgtatgtacggtctgatattatcgagatttaataattgcgggtatcactgttatgaaaccatactgatagatgtatttgatatactaagcaagtacatggatgatatagatatgatcgataactctactatattacgcggtcgatgtcaataatatacaatttgcaaagcggttattggaatatggagcgagtatcacgctcgataatcaatacggccatccagaaaagcagttacagaagagaaaacaaaacgaaatcgttgttctacaagatgtctctccctacgacgattactacgtaaaaaagatactagcctactgcctattaagggacgagtcattcgcggaactacatagtaaattctgtttaaacgaggactataaaagtgtatttatgaaaaatatatcattcgataagatagattccatcatcgtgacataagtcgcctcaaagagattcgaatctccgacaccgacctgtatacggtatcacagctatcttaaagccatacattcagacagtcacatttcatttcccatgtacgacgatctcatagaacagtgccatctatcgatggagcgtaaaagtaaactcgtcgacaaagcactcaataaattagagtctaccatcggtcaatctagactatcgtatttgcctccggaaattatgcgcaatatcatctaaacagtatgttgtacggaaagaaccattacaaatattatccatgatagaaagaaaatatctatatgattggagaagtaggaaacaggaacaagacaacgattactacattattaaatcatgaagtccgtattatactcgtatatattgtttctctcatgtataataataaacggaagagatatagcaccgcatgcaccatccgatggaaagtgtaaagacaacgaatacaaacgccataatttgtgtccgggaacatacgcttccagattatgcgatagcaagactaacacacgatgtacgccgtgtggttcgggtaccttcacatctcgcaataatcatttacccgcttgtctaagttgtaacggaagacgcgatcgtgtaacacgactcacaatagaatctgtgaatgctctcccggatattattgtcttctcaaaggatcatccggatgcaaggcatgtgtttcccaaacaaaatgtggaataggatacggagtatccggagacgtcatctgttctccgtgtggtctcggaacatattctcacaccgtctcttccgcagataaatgcgaacccgtacccagaaatacgtttaactatatcgatgtggaaattaacctgtatccagttaacgacacgtcgtgtactcggacgaccactaccggtctcagcgaatccatctcaacgtcggaactaactattactatgaatcataaagactgtaatcccgtatttcgtgatggatacttctccgttcttaataaggtagcgacttcaggtttctttacaggagaaaggtgtgcactctgaatttcgagattaaatgcaataacaaagattcttcctccaaacagttaacgaaagcaaagaatgatactatcatgccgcattcggagacagtaactctagtgggcgacatctatatactatatagtaataccaatactcaagactacgaaactgatacaatctcttatcatgtgggtaatgttctcgatgtcgatagccatatgcccggtagttgcgatatacataaactgatcactaattccaaacccacccactttttatagtaagtttttcacccataaataataaatacaataattaatttctcgtaaaagtagaaaatatattctaatttattgcacggtaaggaagtagaatcataaagaacagtactcaatcaatagcaattatgaaacaatatatcgtcctggcatgcatgtgcctggcggcagctgctatgcctgccagtcttcagcaatcatcctcatcctcctcctcgtgtacggaagaagaaaacaaacatcatatgggaatcgatgttattatcaaagtcacaaagcaagaccaaacaccgaccaatgataagatttgccaatccgtaacggaaattacagagtccgagtcagatccagatcccgaggtggaatcagaagatgattccacatcagtcgaggatgtagatcctcctaccacttattactccatcatcggtggaggtctgagaatgaactttggattcaccaaatgtcctcagattaaatccatctcagaatccgctgatggaaacacagtgaatgctagattgtccagcgtgtccccaggacaaggtaaggactctcccgcgatcactcatgaagaagctcttgctatgatcaaagactgtgaagtgtctatcgacatcagatgtagcgaagaagagaaagacagcgacatcaagacccatccagtactcgggtctaacatctctcataagaaagtgagttacgaagatatcatcggttcaacgatcgtcgatacaaaatgcgtcaagaatctagagtttagcgttcgtatcggagacatgtgcaaggaatcatctgaacttgaggtcaaggatggattcaagtatgtcgacggatcggcatctgaaggtgcaaccgatgatacttcactcatcgattcaacaaaactcaaagcgtgtgtctgaatcgataactctattcatctgaaattggatgagtagggttaatcgaacgattcaggcacaccacgaattaaaaaagtgtaccggacactatattccggtttgcaaaacaaaaatgttcttaactacattcacaaaaagttacctctcgcgacttcttctttttctgtctcaatagtgtgatacgattatgacactattcctattcctattcctatttcctttcagagtatcacaaaaatattaaacctctttctgatggtctcataaaaaaagttttacaaaaatatttttattctctttctctctttgatggtctcataaaaaaagttttacaaaaatatttttattctctttctctctttgatggtctcataaaaaaagttttacaaaaatatttttattctctttctctctttgatggtctcataaaaaaagttttacaaaaatatttttattctctttctctctttgatggtctcataaaaaaagttttacaaaaatatttttattctctttctctctttgatggtctcataaaaaaagttttacaaaaatatttttattctctttctctctttgatggtctcataaaaaaagttttacaaaaatatttttattctctttctctctttgatggtctcataaaaaaagttttacaaaaatatttttattctctttctctctttgatggtctcataaaaaaagttttacaaaaatatttttattctctttctctctttgatggtctcataaaaaaagttttacaaaaatatttttattctctttctctctttgatggtctcataaaaaaagttttacaaaaatatttttattctctttctctctttgatggtctcataaaaaaagttttacaaaaatatttttattctctttctctctttgatggtctcataaaaaagttttacaaaaatatttttattctctttctctctttgatggtctcataaaaaagttttacaaaaatatttttattctctttctctctttgatggtctcataaaaaaagttttacaaaaatatttttattctctttctctctttgatggtctcataa

SEQ ID NO: 207 - DNA, 6268 bp, Artificial Sequence
  TK-SL-mLIGHT1
agcgcccaatacgcaaaccgcctctccccgcgcgttggccgattcattaatgcagctggcacgacaggtttcccgactggaaagcgggcagtgagcgcaacgcaattaatgtgagttagctcactcattaggcaccccaggctttacactttatgcttccggctcgtatgttgtgtggaattgtgagcggataacaatttcacacaggaaacagctatgaccatgattacgccaagctttgttacagatggaagggtcaaacttaataaaggatatttgttcgactttgtgattagtttgatgcgattcaaaaaagaatcctctctagctaccaccgcaatagatcctgttagatacatagatcctcgtcgtgatatcgcattttctaacgtgatggatatattaaagtcgaataaagtgaacaataattaattctttattgtcatcatgaacggcggacatattcagttgataatcggccccatgttttcaggtaaaagtacagaattaattagacgagttagacgttatcaaatagctcaatataaatgcgtgactataaaatattctaacgataatagatacggaacgggactatggacgcatgataagaataattttgaagcattggaagcaactaaactatgtgatgtcttggaatcaattacagatttctccgtgataggtatcgatgaaggacagttctttccagacattgtttaattctgtgagcgtatggcaaacggtaccgagctcttttttttttttttttttttggcatataaataagtcgacgccaccatggagagtgtggtacagccttcagtgtttgtggtggatggacagacggacatcccattcaggcggctggaacagaaccaccggagacggcgctgtggcactgtccaggtcagcctggccctggtgctgctgctaggtgctgggctggccactcagggctggtttctcctgagactgcatcaacgtcttggagacatagtagctcatctgccagatggaggcaaaggctcctgggagaagctgatacaagatcaacgatctcaccaggccaacccagcagcacatcttacaggagccaacgccagcttgataggtattggtggacctctgttatgggagacacgacttggcctggccttcttgaggggcttgacgtatcatgatggggccctggtgaccatggagcccggttactactatgtgtactccaaagtgcagctgagcggcgtgggctgcccccaggggctggccaatggcctccccatcacccatggactatacaagcgcacatcccgctacccgaaggagttagaactgctggtcagtcggcggtcaccctgtggccgggccaacagctcccgagtctggtgggacagcagcttcctgggcggcgtggtacatctggaggctggggaagaggtggtggtccgcgtgcctggaaaccgcctggtcagaccacgtgacggcaccaggtcctatttcggagctttcatggtctgattaattaatttttatcgatctaattcaacaatgtctggagagctcggatccttctgtgagcgtatggcaaacgaaggaaaaatagttatagtagccgcactcgatgggacatttcaacgtaaaccgtttaataatattttgaatcttattccattatctgaaatggtggtaaaactaactgctgtgtgtatgaaatgctttaaggaggcttccttttctaaacgattgggtgaggaaaccgagatagagataataggaggtaatgatatgtatcaatcggtgtgtagaaagtgttacgtcggctcataatattatattttttatctaaaaaactaaaaataaacattgattaaattttaatataatacttaaaaatggatgttgtgtcgttagataaaccgtttatgtattttgaggaaattgataatgagttagattacgaaccagaaagtgcaaatgaggtcgcaaaaaaactgccgtatcaaggacagttaaaactattactaggagaattattttttcttagtaagttacagcgacacggtatattagatggtgccaccgtagtgtactagttaacggccgccagtgtgctggaattctagaaaagtagaaaatatattctaatttattgcacgggatgagcgaaaaatacatcgtcacctgggacatgttgcagatccatgcacgtaaactcgcaagccgactgatgccttctgaacaatggaaaggcattattgccgtaagccgtggcggtctggtaccgggtgcgttactggcgcgtgaactgggtattcgtcatgtcgataccgtttgtatttccagctacgatcacgacaaccagcgcgagcttaaagtgctgaaacgcgcagaaggcgatggcgaaggcttcatcgttattgatgacctggtggataccggtggtactgcggttgcgattcgtgaaatgtatccaaaagcgcactttgtcaccatcttcgcaaaaccggctggtcgtccgctggttgatgactatgttgttgatatcccgcaagatacctggattgaacagccgtgggatatgggcgtcgtattcgtcccgccaatctccggtcgctaaggatcagcttggcgtaatcaagccgaattctgcagatatccatcacactggcggccgctcgagcatgcatctagagggcccaattcgccctatagtgagtcgtattacaattcactggccgtcgttttacaacgtcgtgactgggaaaaccctggcgttacccaacttaatcgccttgcagcacatccccctttcgccagctggcgtaatagcgaagaggcccgcaccgatcgcccttcccaacagttgcgcagcctgaatggcgaatggacgcgccctgtagcggcgcattaagcgcggcgggtgtggtggttacgcgcagcgtgaccgctacacttgccagcgccctagcgcccgctcctttcgctttcttcccttcctttctcgccacgttcgccggctttccccgtcaagctctaaatcgggggctccctttagggttccgatttagtgctttacggcacctcgaccccaaaaaacttgattagggtgatggttcacgtagtgggccatcgccctgatagacggtttttcgccctttgacgttggagtccacgttctttaatagtggactcttgttccaaactggaacaacactcaaccctatctcggtctattcttttgatttataagggattttgccgatttcggcctattggttaaaaaatgagctgatttaacaaaaatttaacgcgaattttaacaaaattcagggcgcaagggctgctaaaggaagcggaacacgtagaaagccagtccgcagaaacggtgctgaccccggatgaatgtcagctactgggctatctggacaagggaaaacgcaagcgcaaagagaaagcaggtagcttgcagtgggcttacatggcgatagctagactgggcggttttatggacagcaagcgaaccggaattgccagctggggcgccctctggtaaggttgggaagccctgcaaagtaaactggatggctttcttgccgccaaggatctgatggcgcaggggatcaagatctgatcaagagacaggatgaggatcgtttcgcatgattgaacaagatggattgcacgcaggttctccggccgcttgggtggagaggctattcggctatgactgggcacaacagacaatcggctgctctgatgccgccgtgttccggctgtcagcgcaggggcgcccggttctttttgtcaagaccgacctgtccggtgccctgaatgaactgcaggacgaggcagcgcggctatcgtggctggccacgacgggcgttccttgcgcagctgtgctcgacgttgtcactgaagcgggaagggactggctgctattgggcgaagtgccggggcaggatctcctgtcatcccaccttgctcctgccgagaaagtatccatcatggctgatgcaatgcggcggctgcatacgcttgatccggctacctgcccattcgaccaccaagcgaaacatcgcatcgagcgagcacgtactcggatggaagccggtcttgtcgatcaggatgatctggacgaagagcatcaggggctcgcgccagccgaactgttcgccaggctcaaggcgcgcatgcccgacggcgaggatctcgtcgtgacccatggcgatgcctgcttgccgaatatcatggtggaaaatggccgcttttctggattcatcgactgtggccggctgggtgtggcggaccgctatcaggacatagcgttggctacccgtgatattgctgaagagcttggcggcgaatgggctgaccgcttcctcgtgctttacggtatcgccgctcccgattcgcagcgcatcgccttctatcgccttcttgacgagttcttctgaattgaaaaaggaagagtatgagtattcaacatttccgtgtcgcccttattcccttttttgcggcattttgccttcctgtttttgctcacccagaaacgctggtgaaagtaaaagatgctgaagatcagttgggtgcacgagtgggttacatcgaactggatctcaacagcggtaagatccttgagagttttcgccccgaagaacgttttccaatgatgagcacttttaaagttctgctatgtggcgcggtattatcccgtattgacgccgggcaagagcaactcggtcgccgcatacactattctcagaatgacttggttgagtactcaccagtcacagaaaagcatcttacggatggcatgacagtaagagaattatgcagtgctgccataaccatgagtgataacactgcggccaacttacttctgacaacgatcggaggaccgaaggagctaaccgcttttttgcacaacatgggggatcatgtaactcgccttgatcgttgggaaccggagctgaatgaagccataccaaacgacgagcgtgacaccacgatgcctgtagcaatggcaacaacgttgcgcaaactattaactggcgaactacttactctagcttcccggcaacaattaatagactggatggaggcggataaagttgcaggaccacttctgcgctcggcccttccggctggctggtttattgctgataaatctggagccggtgagcgtgggtctcgcggtatcattgcagcactggggccagatggtaagccctcccgtatcgtagttatctacacgacggggagtcaggcaactatggatgaacgaaatagacagatcgctgagataggtgcctcactgattaagcattggtaactgtcagaccaagtttactcatatatactttagattgatttaaaacttcatttttaatttaaaaggatctaggtgaagatcctttttgataatctcatgaccaaaatcccttaacgtgagttttcgttccactgagcgtcagaccccgtagaaaagatcaaaggatcttcttgagatcctttttttctgcgcgtaatctgctgcttgcaaacaaaaaaaccaccgctaccagcggtggtttgtttgccggatcaagagctaccaactctttttccgaaggtaactggcttcagcagagcgcagataccaaatactgttcttctagtgtagccgtagttaggccaccacttcaagaactctgtagcaccgcctacatacctcgctctgctaatcctgttaccagtggctgctgccagtggcgataagtcgtgtcttaccgggttggactcaagacgatagttaccggataaggcgcagcggtcgggctgaacggggggttcgtgcacacagcccagcttggagcgaacgacctacaccgaactgagatacctacagcgtgagctatgagaaagcgccacgcttcccgaagggagaaaggcggacaggtatccggtaagcggcagggtcggaacaggagagcgcacgagggagcttccagggggaaacgcctggtatctttatagtcctgtcgggtttcgccacctctgacttgagcgtcgatttttgtgatgctcgtcaggggggcggagcctatggaaaaacgccagcaacgcggcctttttacggttcctggccttttgctggccttttgctcacatgttctttcctgcgttatcccctgattctgtggataaccgtattaccgcctttgagtgagctgataccgctcgccgcagccgaacgttgtttaattctgtgagcgtatggcaaacg

SEQ ID NO: 208 - DNA, 46 bp, Artificial Sequence
  FSEin-5 primer
tcgtgtctgtaagcttaaaaattgaaaaactagcgtctttttttgc

SEQ ID NO: 209 - DNA, 42 bp, Artificial Sequence
  FinhNISa-3 primer
ggatcctgcgaagctttccagacattgttgaattagatcgat

SEQ ID NO: 210 - DNA, 201871 bp, Artificial Sequence
  GLV-1h330
ttatgagaccatcaaagagagaaagagaataaaaatatttttgtaaaactttttttatgagaccatcaaagagagaaagagaataaaaatatttttgtaaaacttttttatgagaccatcaaagagagaaagagaataaaaatatttttgtaaaacttttttatgagaccatcaaagagagaaagagaataaaaatatttttgtaaaactttttttatgagaccatcaaagagagaaagagaataaaaatatttttgtaaaactttttttatgagaccatcaaagagagaaagagaataaaaatatttttgtaaaactttttttatgagaccatcaaagagagaaagagaataaaaatatttttgtaaaactttttttatgagaccatcaaagagagaaagagaataaaaatatttttgtaaaactttttttatgagaccatcaaagagagaaagagaataaaaatatttttgtaaaactttttttatgagaccatcaaagagagaaagagaataaaaatatttttgtaaaactttttttatgagaccatcaaagagagaaagagaataaaaatatttttgtaaaactttttttatgagaccatcaaagagagaaagagaataaaaatatttttgtaaaactttttttatgagaccatcaaagagagaaagagaataaaaatatttttgtaaaactttttttatgagaccatcaaagagagaaagagaataaaaatatttttgtaaaactttttttatgagaccatcaaagagagaaagagaataaaaatatttttgtaaaactttttttatgagaccatcagaaagaggtttaatatttttgtgatactctgaaaggaaataggaataggaataggaatagtgtcataatcgtatcacactattgagacagaaaaagaagaagtcgcgagaggtaactttttgtgaatgtagttaagaacatttttgttttgcaaaccggaatatagtgtccggtacacttttttaattcgtggtgtgcctgaatcgttcgattaaccctactcatccaatttcagatgaatagagttatcgattcagacacacgctttgagttttgttgaatcgatgagtgaagtatcatcggttgcaccttcagatgccgatccgtcgacatacttgaatccatccttgacctcaagttcagatgattccttgcacatgtctccgatacgaacgctaaactctagattcttgacgcattttgtatcgacgatcgttgaaccgatgatatcttcgtaactcactttcttatgagagatgttagacccgagtactggatgggtcttgatgtcgctgtctttctcttcttcgctacatctgatgtcgatagacacttcacagtctttgatcatagcaagagcttcttcatgagtgatcgcgggagagtccttaccttgtcctggggacacgctggacaatctagcattcactgtgtttccatcagcggattctgagatggatttaatctgaggacatttggtgaatccaaagttcattctcagacctccaccgatgatggagtaataagtggtaggaggatctacatcctcgactgatgtggaatcatcttctgattccacctcgggatctggatctgactcggactctgtaatttccgttacggattggcaaatcttatcattggtcggtgtttggtcttgctttgtgactttgataataacatcgattcccatatgatgtttgttttcttcttccgtacacgaggaggaggatgaggatgattgctgaagactggcaggcatagcagctgccgccaggcacatgcatgccaggacgatatattgtttcataattgctattgattgagtactgttctttatgattctacttccttaccgtgcaataaattagaatatattttctacttttacgagaaattaattattgtatttattatttatgggtgaaaaacttactataaaaagtgggtgggtttggaattagtgatcagtttatgtatatcgcaactaccgggcatatggctatcgacatcgagaacattacccacatgataagagattgtatcagtttcgtagtcttgagtattggtattactatatagtatatagatgtcgcccactagagttactgtctccgaatgcggcatgatagtatcattctttgctttcgttaactgtttggaggaagaatctttgttattgcatttaatctcgaaattcagagtgcacacctttctcctgtaaagaaacctgaagtcgctaccttattaagaacggagaagtatccatcacgaaatacgggattacagtctttatgattcatagtaatagttagttccgacgttgagatggattcgctgagaccggtagtggtcgtccgagtacacgacgtgtcgttaactggatacaggttaatttccacatcgatatagttaaacgtatttctgggtacgggttcgcatttatctgcggaagagacggtgtgagaatatgttccgagaccacacggagaacagatgacgtctccggatactccgtatcctattccacattttgtttgggaaacacatgccttgcatccggatgatcctttgagaagacaataatatccgggagagcattcacagattctattgtgagtcgtgttacacgatcgcgtcttccgttacaacttagacaagcgggtaaatgattattgcgagatgtgaaggtacccgaaccacacggcgtacatcgtgtgttagtcttgctatcgcataatctggaagcgtatgttcccggacacaaattatggcgtttgtattcgttgtctttacactttccatcggatggtgcatgcggtgctatatctcttccgtttattattatacatgagagaaacaatatatacgagtataatacggacttcatgatttaataatgtagtaatcgttgtcttgttcctgtttcctacttctccaatcatatagatattttctttctatcatggataatatttgtaatggttctttccgtacaacatactgtttagatgatattgcgcataatttccggaggcaaatacgatagtctagattgaccgatggtagactctaatttattgagtgctttgtcgacgagtttacttttacgctccatcgatagatggcactgttctatgagatcgtcgtacatgggaaatgaaatgtgactgtctgaatgtatggctttaagatagctgtgataccgtatacaggtcggtgtcggagattcgaatctctttgaggcgacttatgtcacgatgatggaatctatcttatcgaatgatatatttttcataaatacacttttatagtcctcgtttaaacagaatttactatgtagttccgcgaatgactcgtcccttaataggcagtaggctagtatcttttttacgtagtaatcgtcgtagggagagacatcttgtagaacaacgatttcgttttgttttctcttctgtaactgcttttctggatggccgtattgattatcgagcgtgatactcgctccatattccaataaccgctttgcaaattgtatattattgacatcgaccgcgtaatatagtagagttatcgatcatatctatatcatccatgtacttgcttagtatatcaaatacatctatcagtatggtttcataacagtgatacccgcaattattaaatctcgataatatcagaccgtacatacatagacggccattgttcgatacgtgatttacagccgcgtgtccatattttccacgataaaccttacgacgtttacatcgacgagattattattaacaaagtagtcgtgtagaggatagttgttgtccgttatctaacatgcatcgaacgaccatatcgccgtaatgtaagtagtttatcagtatggcttgtacgatggattcatcctgttgtctaaatctctttagaatgttatcgatgatgtagtggttatattctctggaatcgtacgaagtaatactacgcattacgtcgacaagagtatgacgtctctcaataagaagattaacgatttccatgtctacattatatggggttactctaaatcgcttgtttagataatacgcctctaatatagggctgacgtcgtatactctacacgtgtccacatcctttattaataataatttaacaatctctatatctatggttgagaaagaccagtagtattggatgggtaaagatcctccttcgtctctgccatggatggaaacattgttatcgatcaaacatttaattacatccttggatagagattgagattctctatgagacgatatatagtaatgaagagagttcttacacatatcactgtcgtacatacaggtacgaaatacgtaaccggtgctgtaacattctgatttaagaagccatagcaatacttctggtctcggattaggcgtcgttacgtatatatccaccaatccgagaccattgattgcataattcgtattcttggacggacgtatccgtttatccacaattaggtattttagcagacgtaagtcgatattatccgaatacagatcgaaatcatttatattcgacttgagttcgttagaggaatttgaatagctggatatcagtagatgcacaatctgagattttacgtatctatgcttactgtatactcctagcggagttaatccttcgttgtttctacaaagtctctcgactccgcgagagaacaatcttaatgtctgtatcgcatttattggagacgtaacaatgtagcgcattgtttcctcgtctatctatatgttttgataagttgtgacacgtttcaatttctagttttatttttttgtacgtcacatcttcatccagtagacgacatagaatagtgcactctctaccacaataatccatagctattctggtgctaattattcctatttcacgaaggcaatcattcctcataagatgataaaaagtgtagtggagatttagtatttagcagtgcggatatgatccaagagggtgagatagtcgttctcgttcagaatctttcgcagcataagtagtatgtcgatatacttatcgttgaagactctttataaaagtctatttgtttatatttattgcggatagcagtatttccctataaaaagtatacgtcctgtggtgtctttaatcatgtacatgaatggatggtttatgtagaccttcgtacgatataccatcgaaaagttaatcgtaaatactcctgtaacggccgatgcttctgtatactcctcattaacatctataaacgtcgtatgtagaaatttttctacagtgatagtttcattacacatcttgctaaaatctgcataatatccgaatatattagtaagtcctaaattttctaaaatcggtaccagattatacggttctgtcatttccactttaaactttggcatatacaagtctatacttttagtagataacataccacaccattttttaaatttttcatctgttatatttttttctatgttatatataccttctatgtcgtccggtagtataattaccatactagagtttccctcgtatggaatatcgataatagagaatcctccgaataattcattaatatgtacatattgcaagttattctcggtacccaccatcatatcaacgctggtaactatattcttagaaatataaaacttgtctgtatatgtaagatgtttagaaaatggatatttccacattgctttaaaatggacggcgctaacaactgtcatacgagtattaatggatagcggactagtcaataaggaattaattttaccatttgtcattgtcttaacccattcgttgattagttcctttgtttggttagcattattaaagtttacagtttgaaaatcgtcttttattttttgtaggaaggaggcgtggaactcgatactatcgctaccgtatattttatttgcggtagctagtgtcgcacaatacggaatatctacctccatgtcatcattattgtcatcgggtgtattctcattcatattctctatatattttgatagttgttcagctgtagaaccagctgctccatgatttagaatagataaagtagataaaatggaaactggagaaatcaaaacattttcatcagggtgttttaagattagttctttaaagatatccatggtatagacctaacgataacgatatatatcataaataaataatgttaaatttcaatttatgtttgtaccccgtattcatacttaacaaattggtattgcgtacacaatcaatcatattacataccattaataatgcaagcataaaaaattgttagtagatgtttctaaatataggttccgtaagcaaagaatataagaatgaagcggtaatgataaaatcaatcgttatctaaaatgatcatactcatttattttattctattatattaacacatacatttttaacagcaacacattcaatattgtattgttatttttatattatttacacaattaacaatatattattagtttatattactgaattaataatataaaattcccaatcttgtcataaacacacactgagaaacagcataaacacagaatccatcaaaaatgttgataaattatctgatgttgttgttcgctgctatgataatcagatcattcgccgatagtggtaacgctatcgaaacgacattgccagaaattacaaacgctacaacagatattccagctatcagattatgcggtccagagggagatggatattgtttacacggtgactgtatccacgctagagatattgacggtatgtattgtagatgctctcatggttatacaggcattagatgtcagcatgtagtattagtagactatcaacgttcagaaaacccaaacactacaacgtcatatatcccatctcccggtattatgcttgtattagtaggcattattatgtgttgtctattatctgtttataggttcactcgacgaactaaactacctatacaagatatggttgtgccataatttttataaatttttttatgagtatttttacaaaaatgtataaagtgtatgtcttatgtatatttataaaaatgctaagtatgcgatgtatctatgttatttgtatttatctaaacaatacctctacctctagatattatacaaaaattttttatttcggcatattaaagtaaaatctagttaccttgaaaatgaatacagtgggtggttccgtatcaccagtaagaacataatagtcaaatacagtatccgattgagattttgcatacaatactagtctagaaagaaatttgtaatcatcttctgtgacgggagtccatatatctgtatcatcgtctagtttatcagtgtcccatgctatattcctgttatcatcattagttaatgaaaataactctcgtgcttcagaaaagtcaaatattgtatccatacatacatctccaaaactatcgcttatacgtttatctttaacgatacctatacctagatggttatttactaacagacattttccagatctattgactataactcctatagtttccacatcaaccaagtaatgatcatctattgttatataacaataacataactcttttccatttttatcagtatgtatatctatatcaacgtcgtcgttgtagtgaatagtagtcattgatctattatatgaaacggatatgtctagaacggcaattgttttacgtccagttaacactttcgttgatttaaagtctagagtctttgcaaacataatatccttatccgactttatatttcctgtagggtggtataattttattttgcctccacatatcggtgtttccaaatatattactagacaatattccatatagttattagttaagggtacccaattagaacacgtacgcttattatcatcatttggatcgtatttcataaaagttattgtgttatcgatgtcaacacattctacattttttaatcgtctatatagtatttttctgatattttctataatatcagaattgtcttccatcggaagttgtatactatcggaatcagttacatgtttaaataattctctgatgtcattccttatacaatcaaattcattattaaacagtttaatagtctgtagacctttatcgtcgtaaatatccattgtcttattagttacgcttatttttatgtgtttttacgttgctttattatattttataagaatgattgtttgacgaatcacgagaactattaagacacattattaggtatatattataaaaaagtttttgattacgatgttataagaggaaagaggacacattaacatcatacatcaattaactacattcttataacatcgtaatcaaaagaattgcaattttgatgtataacaactgtcaatgggttatggaattgtatattacatattatacggtatgttggtaacgacaaataccggtcggtaattgtctgccggtgtaatagaattatatatatctatctattacaccggccttgtatacataataataagttgtggtagtatgatctccatatttataatttaggactttgtattcagtatttttggaatcataaaaaataaaaaaaagttttactaatttaaaatttaaaaagtatttacatttttttcactgtttagtcgcggatatggaattcgatcctgccaaaatcaatacatcatctatagatcatgtaacaatattacaatacatagatgaaccaaatgatataagactaacagtatgcattatccgaaatattatatcaatatcacaaaaataaatacacatttggctaatcaatttcgggcttggaaaaaacgtatcgccggaagggactatatgactaacttatctagagatacaggaatacaacaatcaaaacttactgaaactatacgtaactgtcaaaaaaatagaaacatatatggtctatatatacactacaatttagttattaattggataaccgatgtgattatcaatcaatattaagagggttggtaaattggtacatagctaataatacctatactccaaatacacccaataatacaacaaccatttctgagttggatatcatcaaaatactaaataaatacgaggacgtgtatagagtaagtaaagaaaaagaatgtggaatttgctatgaagttgtttactcaaaacgatagatactttggtttattggattcgtgtactcatatattttgcataacatgcatcaatatatggcatagaacacgaagagaaaccggtgcgtcggataattgtcctatatgccgtacccgttttagaaacataacaatgagcaagttctataagctagttaactaataaataaaaagtttaatttgttgacgacgtatgtcgttattttttctcgtataaaagattaatttgattctaatataatctttagtattggataaatatcaattcaaattaattccattagattatatcataaataaaaatagtagcacacaactacttcagcaaacattctttttataaatgccatctagcgtagcgaggacacaagtgaacctataattatcaaatttattagtatcagtcacatgaaggactttacgtagagtgacgattccactatctgtggtacgaacggtttcatcttctttgatgccatcacccagatgttctataaacttggtatcctcgtccgatttcatatcctttgccaaccaatacatatagctaaactcaggcatatgttccacacatcctgaacaatgaaattctccagaagatgttacaatgtctagatttggacatttggtttcaaccgcgttaacatatgagtgaacacacccatacatgaaagcgatgagaaataggattctcatcttgccaaaatatcactagaaaaaatttatttatcagttttaaaggtataaaaaatacttattgttgctcgaatattttgtatttgatggtatacggaagattagaaatgtaggtattatcatcaactgattctatggttttatgtattctatcatgtttcactattgcgttggaaataatatcatatgcttccacatatattttattttgttttaactcataatactcacgtaattctggattattggcatatctatgaataattttagctccatgatcagtaaatattaatgagaacatagtattaccacctaccattatttttttcatctcattcaattcttaattgcaaagatctatataatcattatagcgttgacttatggactctggaatcttagacgatgtacagtcatctataatcatggcatatttaatacattgttttatagcatagtcgttatctacgatgttagatatttctctcaatgaatcaatcacacaatctaatgtaggtttatgacataatagcattttcagcagttcaatgtttttagattcgttgatggcaatggctatacatgtatatccgttatttgatctaatgttgacatctgaaccggattctagcagtaaagatactagagattgtttattatatctaacagccttgtgaagaagtgtttctcctcgtttgtcaatcatgttaatgtctttaagataaggtaggcaaatgtttatagtactaagaattgggcaagcataagacatgtcacaaagacccttttttgtatgtataagtgtaaaaattataacatccatagttggatttacataggtgtccaatcgggatctctccatcatcgagataattgatggcatctcccttccttttttagtagatatttcatcgtgtaagaatcaatattaatatttctaaagtatccgtgtatagcctctttatttaccacagctccatattccactagagggatatcgccgaatgtcatatactcaattagtatatgttggaggacatccgagttcattgttttcaatatcaaagagatggtttccttatcatttctccatagtggtacaatactacacattattccgtgcggctttccattttccaaaaacaatttgaccaaatctaaatctacatctttattgtatctataatcactatttagataatcagccataattcctcgagtgcaacatgttagatcgtctatatatgaataagcagtgttatctattcctttcattaacaatttaacgatgtctatatctatatgagatgacttaatataatattgaagagctgtacaatagtttttatctataaaagacggcttgattccgtgattaattagacatttaacaacttccggacgcacatatgctctcgtatccgactctgaatacagatgagagatgatatacagatgcaatacggtaccgcaatttcgtagttgataatcatcatacgcgtatcagtactcgtcctcataaagaacactgcagccattttctatgaacaaatcaataattttagaaacaggatcattgtcattacataattttctataactgaacgatggttttcacatttaacactcaagtcaaatccatgttctaccaacacctttatcaagtcaacgtctacatttttggatttcatatagctgaatatattaaagttatttatgttgctaaatccagtggcttctagtagagccatcgctatatccttattaactttaacatgtctactatttgtgtattcttctaatggggtaagctgtctccaatttttgcgtaatggattagtgccactgtctagtagtagtttgacgacctcgacattattacaatgctcattaaaaaggtatgcgtgtaaagcattattcttgaattggttcctggtatcattaggatctctgtctttcaacatctgtttaagttcatcaagagccacctcctcattttccaaatagtcaaacattttgactgaatgagctactgtgaactctatacacccacacaactaatgtcattaaatatcatgtcaaaaacttgtacaattattaataaaaataatttagtgtttaaattttaccagttccagattttacacctccgttaatacctccattaaccccactggacgatcctcctccccacattccaccgccaccagatgtataagttttagatcctttattactaccatcatgtccatggataaagacactccacatgccgccactaccccctttagaagacatattaataagacttaaggacaagtttaacaataaaattaatcacgagtaccctactaccaacctacactattatatgattatagtttctatttttacagtaccttgactaaagtttctagtcacaagagcaatactaccaacctacactattatatgattatagtttctatttttataggaacgcgtacgagaaaatcaaatgtctaatttctaacggtagtgttgataaacgattgttatccgcggatacctcctctatcatgtcgtctattttcttactttgttctattaacttattagcattatatattatttgattataaaacttatattgcttattagcccaatctgtaaatatcggattattaacatatcgtttctttgtaggtttatttaacatgtacatcactgtaagcatgtccttaccatttattttaatttgacgcatatccgcaatttctttttcgcagtcggttataaattctatatatgatggatacatgctacatgtgtacttataatcgactaatatgaagtacttgatacatattttcagtaacgatttattattaccacctatgaataagtacctgtgatcgtctaggtaatcaactgttttcttaatacattcgatggttggtaatttactcagaataatttccaatatcttaatatataattctgctatttctgggatatatttatctgccagtataacacaaatagtaatacatgtaaacccatattttgttattatattaatgtctgcgccattatctattaaccattctactaggctgacactatgcgactcaatacaatgataaagtatactacatccatgtttatctattttgtttatatcatcaatatacggcttacaaagttttagtatcgataacacatccaactcacgcatagagaaggtagggaataatggcataatatttattaggttatcatcattgtcattatctacaactaagtttccattttttaaaatatactcgacaactttaggatctctattgccaaatttttgaaaatatttatttatatgcttaaatctatataatgtagctccttcatcaatcatacatttaataacattgatgtatactgtatgataagatacatattctaacaatagatcttgtatagaatctgtatatcttttaagaattgtggatattaggatattattacataaactattacacaattctaaaatataaaacgtatcacggtcgaataatagttgatcaactatataattatcgattttgtgatttttcttcctaaactgtttacgtaaatagttagatagaatattcattagttcatgaccactatagttactatcgaataacgcgtcaaatatttcccgtttaatatcgcatttgtcaagataataatagagtgtggtatgttcacgataagtataataacgcatctctttttcgtgtgaaattaaatagtttattacgtccaaagatgtagcataaccatcttgtgacctagtaataatataataatagagaactgttttacccattctatcatcataatcagtggtgtagtcgtaatcgtaatcgtctaattcatcatcccaattataatattcaccagcacgtctaatctgttctattttgatcttgtatccatactgtatgttgctacatgtaggtattcctttatccaataatagtttaaacacatctacattgggatttgatgttgtagcgtatttttctacaatattaataccatttttgatactatttatttctatacctttcgaaattagtaatttcaataagtctatattgatgttatcagaacatagatattcgaatatatcaaaatcattgatatttttatagtcgactgacgacaataacaaaatcacaacatcgtttttgatattattatttttcttggtaacgtatgcctttaatggagtttcaccatcatactcatataatggatttgcaccactttctatcaatgattgtgcactgctggcatcgatgttaaatgttttacaactatcatagagtatcttatcgttaaccatgattggttgttgatgctatcgcattttttggtttctttcatttcagttatgtatggatttagcacgtttgggaagcatgagctcatatgatttcagtactgtagtgtcagtactattagtttcaataagatcaatctctagatctatagaatcaaaacacgataggtcagaagataatgaatatctgtaggcttcttgttgtactgtaacttctggttttgttagatggttgcatcgtgctttaacgtcaatggtacaaattttatcctcgctttgtgtatcatattcgtccctactataaaattgtatattcagattatcatgcgatgtgtatacgctaacggtatcaataaacggagcacaccatttagtcataaccgtaatccaaaaatttttaaagtatatcttaacgaaagaagttgtgtcattgtctacggtgtatggtactagatcctcataagtgtatatatctagagtaatgtttaatttattaaatggttgataatatggatcctcgtgacaatttccgaagatggaaataagacataaacacgcaataaatctaattgcggacatggttactccttaaaaaaatacgaataatcaccttggctatttagtaagtgtcatttaacactatactcatattaatccatggactcataatctctatacgggattaacggatgttctatatacggggatgagtagttctcttctttaactttatactttttactaatcatatttagactgatgtatgggtaatagtgtttgaagagctcgttctcatcatcagaataaatcaatatctctgtttttttgttatacagatgtattacagcctcatatattacgtaatagaacgtgtcatctaccttattaactttcaccgcatagttgtttgcaaatacggttaatcctttgacctcgtcgatttccgaccaatctgggcgtataatgaatctaaactttaattgcttgtaatcattcgaaataatttttagtttgcatccgtagttatcccctttatgtaactgtaaatttctcaacgcgatatctccattaataatgatgtcgaattcgtgctgtatacccatactgaatggatgaacgaataccgacggcgttaatagtaatttactttttcatctttacatattgggtactagttttactatcataagtttataaattccacaagctactatggaataagccaaccatcttagtataccacacatgtcttaaagtttattaattaattacatgttgttttatatatatcgctacgaatttaaagagaaattagtttaggaagaaaaattatctatctacatcatcacgtctctgtattctacgatagagtgctactttaagatgcgacagatccgtgtcatcaaatatatactccattaaaatgattattccggcagcgaacttgatattggatatatcacaacctttgttaatatctacgacaatagacagcagtcccatggttccataaacagtgagtttatctttctttgaagagatattttgtagagatcttataaaactgtcgaatgacatcgcatttatatctttagctaaatcgtatatgttaccatcgtaatatctaaccgcgtctatcttaaacgtttccatcgctttaaagacgtttccgatagatggtctcatttcatcagtcatactgagccaacaaatataatcgtgtataacatctttgatagaatcagactctaaagaaaacgaatcggctttattatacgcattcatgataaacttaatgaaaaatgtttttcgttgtttaagttggatgaatagtatgtcttaataattgttattatttcattaattaatatttagtaacgagtacactctataaaaacgagaatgacataactaatcataactagttatcaaagtgtctaggacgcgtaattttcatatggtatagatcctgtaagcattgtctgtattctggagctattttctctatcgcattagtgagttcagaatatgttataaatttaaatcgaataacgaacataactttagtaaagtcgtctatattaactcttttattttctagccatcgtaataccatgtttaagatagtatattctctagttactacgatctcatcgttgtctagaatatcacatactgaatctacatccaattttagaaattggtctgtgttacatatctcttctatattattgttgatgtattgtcgtagaaaactattacgtagaccattttctttataaaacgaatatatagtactccaattatctttaccgatatatttgcacacataatccattctctcaatcactacatctttaagattttcgttgttaagatatttggctaaactatataattctattagatcatcaacagaatcagtatatatttttctagatccaaagacgaactctttggcgtcctctataatattcccagaaaagatattttcgtgttttagtttatcgagatctgatctgttcatatacgccatgattgtacggtacgttatgataaccgcataaaataaaaatccattttcatttttaaccaatactattcataattgagattgatgtaatactttgttactttgaacgtaaagacagtacacggatccgtatctccaacaagcacgtagtaatcaaatttggtgttgttaaacttcgcaatattcatcaatttagatagaaacttatactcatcatctgttttaggaatccatgtattattaccactttccaacttatcattatcccaggctatgtttcgtccatcatcgttgcgcagagtgaataattcttttgtattcggtagttcaaatatatgatccatgcatagatcggcaaagctattgtagatgtgatttttcctaaatctaatataaaactcgtttactagcaaacactttcctgatttatcgaccaagacacatatggtttctaaatctatcaagtggtggggatccatagttatgacgcagtaacatatattattacattcttgactgtcgctaatatctaaatatttattgttatcgtattggattctgcatatagatggcttgtatgtcaaagatatagaacacataaccaatttatagtcgcgctttacattctcgaatctaaagttaagagatttagaaaacattatatcctcggatgatgttatcactgtttctggagtaggatatattaaagtctttacagatttcgtccgattcaaataaatcactaaataatatcccacattatcatctgttagagtagtatcattaaatctattatattttatgaaagatatatcactgctcacctctatatttcgtacatttttaaactgtttgtataatatctctctgatacaatcagatatatctattgtgtcggtagacgataccgttacatttgaattaatggtgttccattttacaacttttaacaagttgaccaattcatttctaatagtatcaaactctccatgattaaatattttaatagtatccattttatatcactacggacacaaagtagctgacataaaccattgtataatttttatgttttatgtttattagcgtacacattttggaagttccggcttccatgtatttcctggagagcaagtagatgatgaggaaccagatagtttatatccgtacttgcacttaaagtctacattgtcgttgtatgagtatgatcttttaaacccgctagacaagtatccgtttgatattgtaggatgtggacatttaacaatctgacacgtgggtggatcggaccattctcctcctgaacacaggacactagagttaccaatcaacgaatatccactattgcaactataagttacaacgctcccatcggtataaaaatcctcgtatccgttatgtcttccgttggatatagatggaggggattggcatttaacagattcacaaataggtgcctcgggattccataccatagatccagtagatcctaattcacaatacgatttagattcaccgatcaactgatatccgctattacaagagtacgttatactagagccaaagtctactccaccaatatcaagttggccattatcgatatctcgaggcgatgggcatctccgtttaatacattgattaaagagtgtccatccagtacctgtacatttagcatatataggtcccattttttgctttctgtatccaggtagacatagatattctatagtgtctcctatgttgtaattagcattagcatcagtctccacactattcttaaatttcatattaatgggtcgtgacggaatagtacagcatgatagaacgcatcctattcccaacaatgtcaggaacgtcacgctctccaccttcatatttatttatccgtaaaaatgttatcctggacatcgtacaaataataaaaagcccatatatgttcgctattgtagaaattgtttttcacagttgctcaaaaacgatggcagtgacttatgagttacgttacactttggagtctcatctttagtaaacatatcataatattcgatattacgagttgacatatcgaacaaattccaagtatttgattttggataatattcgtattttgcatctgctataattaagatataatcaccgcaagaacacacgaacatctttcctacatggttaaagtacatgtacaattctatccatttgtcttccttaactatatatttgtatagataattacgagtctcgtgagtaattccagtaattacatagatgtcgccgtcgtactctacagcataaactatactatgatgtctaggcatgggagacttttttatccaacgatttttagtgaaacattccacatcgtttaatactacatatttctcatacgtggtataaactccacccattacatatatatcatcgtttacgaataccgacgcgcctgaatatctaggagtaattaagtttggaagtcttatccatttcgaagtgccgtgtttcaaatattctgccacacccgttgaaatagaaaattctaatcctcctattacatataactttccatcgttaacacaagtactaacttctgattttaacgacgacatattagtaaccgttttccattttttcgttttaagatctacccgcgatacggaataaacatgtctattgttaatcatgccgccaataatgtatagacaattatgtaaaacatttgcattatagaattgtctatctgtattaccgactatcgtccaatattctgttctaggagagtaatgggttattgtggatatataatcagagtttttaatgactactatattatgttttataccatttcgtgtcactggctttgtagatttggatatagttaatcccaacaatgatatagcattgcgcatagtattagtcataaacttgggatgtaaaatgttgatgatatctacatcgtttggatttttatgtatccactttaataatatcatagctgtaacatcctcatgatttacgttaacgtcttcgtgggataagatagttgtcagttcatcctttgataattttccaaattctggatcggatgtcaccgcagtaatattgttgattatttctgacatcgacgcattatatagttttttaattccatatcttttagaaaagttaaacatccttatacaatttgtgaaattaatattatgaatcatagtttttacacatagatctactacaggcggaacatcaattattatggcagcaactagtatcatttctacattgtttatggtgatgtttatcttcttccagcgcatatagtctaatagcgattcaaacgcgtgatagtttataccattcaatataatcgcttcatcctttagatggtgatcctgaatgcgtttaaaaaaattatacggagacgccgtaataatttccttattcacttgtataatttccccattgatagaaaatattacgctttccattcttaaagtactataagtaattatagtataatgtaaacgtttatatattcaatatttttataaaaatcattttgacattaattcctttttaaatttccgtctatcatctatagaaacgtattctatgaatttataaaatgcttttacgtgtcctatcgtaggcgatagaaccgctaaaaagcctatcgaatttctacaaaagaatctgttatatggtatagggagagtataaaacattaaatgtccgtacttattaaagtattcagtagccaatcctaactctttcgaatacttattaatggctcttgttctgtacgaatctatttttttgaacaacggacctagtggtatatcttgttctatgtatctaaaataatgtctgactagatccgttagtttaatatccgcagtcatcttgtctagaatggcaaatctaactgcgggtttaggctttagtttagtttctatatctacatctatgtctttatctaacaccaaaaatataatagctaatattttattacaatcatccggatattcttctacgatctcactaactaatgtttctttggttatactagtatagtcactatcggacaaataaagaaaatcagatgatcgatgaataatacatttaaattcatcatctgtaagatttttgagatgtctcattagaatattattagggttagtactcattatcattcggcagctattacttattttattatttttcaccatatagatcaatcattagatcatcaaaatatgtttcaatcatcctaaagagtatggtgaatgactcttcccatctaatttctgaacgttcaccaatgtctctagccactttggcactaatagcgatcattcgcttagcgtcttctatattattaactggttgatttaatctatctagcaatggaccgtcggacagcgtcattctcatgttcttaatcaatgtacatacatcgccgtcatctaccaattcatccaacaacataagctttttaaaatcatcattataataggtttgatcgttgtcatttctccaaagaatatatctaataagtagagtcctcatgcttagttaacaactattttttatgttaaatcaattagtacaccgctatgtttaatacttattcatattttagtttttaggattgagaatcaatacaaaaattaatgcatcattaattttagaaatacttagtttccacgtagtcaatgaaacatttgaactcatcgtacaggacgttctcgtacaggacgtaactataaaccggtttatatttgttcaagatagatacaaatccgataactttttttacgaattctacgggatccactttaaaagtgtcataccgggttctttttatttttttaaacagatcaatggtgtgatgttgattaggtcttttacgaatttgatatagaatagcgtttacatattctccataatggtcaatcgccatttgttcgtatgtcataaattctttaattatatgacactgtgtattatttagttcatccttgttcattgttaggaatctatccaaaatggcaattatactagaactataggtgcgttgtatacacatattgatgtgtctgtttatacaatccatgatatttggatccatgctactaccttcgggtaaaattgtagcatcatataccatttctagtactttaggttcattattatccattgcagaggacgtcatgatcgaatcataaaaaaatatattatttttatgttattttgttaaaaataatcatcgaatacttcgtaagatactccttcatgaacataatcagttacaaaacgtttatatgaagtaaagtatctacgatttttacaaaagtccggatgcataagtacaaagtacgcgataaacggaataataatagatttatctagtctatctttttctatagctttcatagttagatacatggtctcagaagtaggattatgtaacatcagcttcgataaaatgactgggttatttagtcttacacattcgctcatacatgtatgaccgttaactacagagtctacactaaaatgattgaacaatagatagtctaccattgtttcgtattcagatagtacagcgtagtacatggcatcttcacaaattatatcattgtctaatagatatttgacgcatcttatggatcccacttcaacagccatcttaaaatcatattgctttcctttatcattaataatttctagaacatcatctctatcataaaagatacaaatattaactgtttgatccgtaataacattgctagtcaatagcaatttgttaataagatgcgctgggctcaatgtcttaataagaagtgtaagaggactatctccgaatttgttttgtttattaacatccgttgatggaagtaaaagatctataatgtctacattcttgactgttttagagcatacaatatggagaggtgtatttccatcatgatctggttttgagggactaattcctagtttcatcatccatgagattgtagaagcttttggattgtctgacataagatgtctatgaatatgatttttgccaaatttatccactatcctggcttcgaatccgatggacattatttttttaaacactctttctgaaggatctgtacacgccaacaacggaccacatccttcttcatcaaccgagttgttaatcttggctccatactgtaccaataaatttattctctctatgacttcatcatctgttcccgagagataatatagaggtgttttatgctgtttatcacacgcgtttggatctgcgccgtgcgtcagcagcatcgcgactattctattattattaattttagaagctatatgcaatggataatttccatcatcatccgtctcatttggagagtatcctctatgaagaagttcttcgacaaatcgttcatctagtcctttaattccacaatacgcatgtagaatgtgataattatttccagaaggttcgatagcttgtagcatattcctaaatacatctaaatttttactattatatttggcataaagagatagataatactcggccgacataatgttgtccattgtagtataaaaattaatatttctatttctatttctgtatatttgcaacaatttactctctataacaaatatcataacttagtttttttatgtcaagaaggcactggtttagttcatctataaatgtcacgccataactaccacgcatgccatactcagaattatgataaagatatttatccttggggtgtaggtaatggggattaatctttgttggatcagtctctaagttaacacatgtcacacatgatccatttatagttatatcacacgatgatgatttatgaattgattccggaagatcgctatcgtattttgtggttccacaattcatttccatacatgttattgtcacactaatattatgatgaactttatctagccgctgagtggtaaacaacagaacagatagtttattatctttaccaacaccctcagccgctgccacaaatctctgatccgtatccatgatggtcatgtttatttctagtccgtatccagtcaacactatgttagcatttctgtcgatatagctttcactcatatgacactcaccaataatagtagaattaatgtcgtaatttacaccaatagtgagttcggcggcaaagtaccaataccggtaatcttgtcgaggaggacatatagtattcttgtattctaccgaatacccgagagatgcgatacaaaagagcaagactaatttgtaaaccatcttactcaaaatatgtaacaatagtacgatgcaatgagtaagacaataggaaatctatcttatatacacataattattctatcaattttaccaattagttagtgtaatgttaacaaaaatgtgggagaatctaattagtttttctttacacaattgacgtacatgagtctgagttccttgtttttgctaattatttcatccaatttattattcttgacgatatcgagatcttttgtataggagtcaaacttgtattcaacatgcttttctataatcattttagctatttcggcatcatccaatagtacattttccagattagcagaatagatattaatgtcgtatttgaacagagcctgtaacatctcaatgtctttattatctatagccaatttaatgtccggaatgaagagaagggaattattggtgtttgtcgacgtcatatagtcgagcaagagaatcatcatatccacgtgtccattttttatagtgatgtgaatacaactaaggagaatagccagatcaaaagtagatggtatctctgaaagaaagtaggaaacaatacttacatcattaagcatgacggcatgataaaatgaagttttccatccagttttcccatagaacatcagtctccaatttttcttaacaaacagttttaccgtttgcatgttaccactatcaaccgcataatacaatgcggtgtttcccttgtcatcaaattgtgaatcatccagtccactgaatagcaaaatctttactattttggtatcttccaatgtggctgcctgatgtaatggaaattcattctctagaagatttttcaatgctccagcgttcaacaacgtacatactagacgcacgttattatcagctattgcataatacaaggcactatgtccatggacatccgccttaaatgtatctttactagagagaaagcttttcagctgcttagacttccaagtattaattcgtgacagatccatgtctgaaacgagacgctaattagtgtatattttttcattttttataattttgtcatattgcaccagaattaataatatctttaatagatctgattagtagatacatggctatcgcaaaacaacatatacacatttaataaaaataatatttattaagaaaattcagatttcacgtacccatcaatataaataaaataatgattccttacaccgtacccatattaaggagattccaccttacccataaacaatataaatccagtaatatcatgtctgatgatgaacacaaatggtgtattaaattccagtttttcaggagatgatctcgccgtagctaccataatagtagatgcctctgctacagttccttgttcgtcgacatctatctttgcattctgaaacattttataaatatataatgggtccctagtcatatgtttaaacgacgcattatctggattaaacatactaggagccatcatttcggctatcgacttaatatccctcttattttcgatagaaaatttagggagtttaagattgtacactttattccctaattgagacgaccaatagtctaattttgcagccgtgatagaatctgtgaaatgggtcatattatcacctattgccaggtacatactaatattagcatccttatacggaaggcgtaccatgtcatattctttgtcatcgattgtgattgtatttccttgcaatttagtaactacgttcatcatgggaaccgttttcgtaccgtacttattagtaaaactagcattgcgtgttttagtgatatcaaacggatattgccatatacctttaaaatatatagtattaatgattgcccatagagtattattgtcgagcatattagaatctactacattagacataccggatctacgttctactatagaattaattttattaaccgcatctcgtctaaagtttaatctatataggccgaatctatgatattgttgataatacgacggtttaatgcacacagtattatctacgaaactttgataagttagatcagtgtacgtatatttagatgttttcagcttagctaatcctgatattaattctgtaaatgctggacccagatctctttttctcaaatccatagtcttcaataattctattctagtattacctgatgcaggcaatagcgacataaacatagaaaacgaataaccaaacggtgagaagacaatattatcatcttgaatatttttatacgctactataccggcattggtaaatccttgtagacgataggcggacgctgaacacgctaacgatagtatcaataacgcaatcatgattttatggtattaataattaaccttatttttatgttcggtataaaaaaattattgatgtctacacatccttttgtaattgacatctatatatccttttgtataatcaactctaatcactttaacttttacagttttccctaccagtttatccctatattcaacatatctatccatatgcatcttaacactctctgccaagatagcttcagagtgaggatagtcaaaaagataaatatatagagcataatcattctcgtatactctgccctttattacatcacccgcattgggcaacgaataacaaaatgcaagcatcttgttaacgggctcgtaaattgggataaaaattatgtttttattgtcttatatctattttattcaagagaatattcaggaatttctttttccggttgtatctcgtcgcagtatatatcatttgtacattgtttcatattttttaatagtttacaccttttagtaggactagtatcgtacaattcatagctgtattttgaattccaatcacgcataaaaatatcttccaattgttgacgaagacctaatccatcatccggtgtaatattaatagatgctccacatgtatccgtaaagtaatttcctgtccaatttgaggtacctatataggccgttttatcggttaccatatatttggcatggtttaccctagaatacggaatgggaggatcagcatctggtacaataaatagctttacttctatatttatgtttttagattttagcatagcgatagatcttaaaaagtttctcatgataaacgaagatcgttgccagcaactaatcaatagcttaacggatacttgtctgtctatagcggatcttcttaattcatcttctatataaggccaaaacaaaattttacccgccttcgaataaataatagggataaagttcataacagatacataaacgaatttactcgcatttctaatacatgacaataaagcggttaaatcattggttctttccatagtacatagttgttgcggtgcagaagcaataaatacagagtgtggaacgccgcttacgttaatactaagaggatgatctgtattataatacgacggataaaagtttttccaattatatggtagattgttaactccaagataccagtatacctcaaaaatttgagtgagatccgctgccaagttcctattattgaagatcgcaatacccaattccttgacctgagttagtgatctccaatccatgttagcgcttcctaaataaatatgtgtattatcagatatccaaaattttgtatgaagaactcctcctaggatatttgtaatatctatgtatcgtacttcaactccggccatttgtagtctttcaacatcctttaatggtttgttagatttattaacggctactctaactcgtactcctcttttgggtaattgtacaatctcgtttaatattatcgtgccgaaattcgtacccacttcatccgataaactccaataaaaagatgatatatctagtgtttttgtggtattggatagaatttccctccacatgttaaatgtagacaaatatactttatcaaattgcatacctataggaatagtttctgtaatcactgcgattgtattatccggattcattttatttgttaaaagaataatcctatatcacttcactctattaaaaatccaagtttctatttctttcatgactgattttttaacttcatccgtttccttatgaagatgatgtttggcaccttcataaatttttatttctctattacaatttgcatgttgcatgaaataatatgcacctaaaacatcgctaatcttattgtttgttccctggagtatgagagtcggggggtgttaatcttggaaattatttttctaaccttgttggtagccttcaagacctgactagcaaatccagccttaattttttcatgattgactaatgggtcgtattggtatttataaactttatccatatctctagatactgattctggacatagctttccgactggcgcatttggtgtgatggttcccataagtttggcagctagcagattcagtcttgaaacagcatctgcattaactagaggagacattagaatcattgctgtaaacaagtttggattatcgtaagaggctagctcccatggaatgacccaataagtagatttaatagttaccacgtgctgtaccaaagtcatcaatcatcattttttcaccattacttcttccatgtccaatatgatcatgtgagaatactaaaattcctaacgatgatatgttttcagctagttcgtcataacgtccagaatgtttaccagctccatgacttatgaatactaatgccttaggatatgtaataggtttccaatatttacaatatatgtaatcattgtccagattgaacatacagtttgcactcatgattcacgttatataactatcaatattaacagttcgtttgatgatcatattatttttatgttttattgataattgtaaaaacatacaattaaatcaatatagaggaaggagacggctactgtcttttgtaagatagtcatggcgactaaattagattatgaggatgctgttttttactttgtggatgatgataaaatatgtagtcgcgactccatcatcgatctaatagatgaatatattacgtggagaaatcatgttatagtgtttaacaaagatattaccagttgtggaagactgtacaaggaattgatgaagttcgatgatgtcgctatacggtactatggtattgataaaattaatgagattgtcgaagctatgagcgaaggagaccactacatcaattttacaaaagtccatgatcaggaaagtttattcgctaccataggaatatgtgctaaaatcactgaacattggggatacaaaaagatttcagaatctagattccaatcattgggaaacattacagatttgatgaccgacgataatataaacatcttgatactttttctagaaaaaaaattgaattgatgatataggggtcttcataacgcataattattacgttagcattctatatccgtgttaaaaaaaattatcctatcatgtatttgagagttttatatgtagcaaacatgatagctgtgatgccaataagctttagatattcacgcgtgctagtgttagggatggtattatctggtggtgaaatgtccgttatataatctacaaaacaatcatcgcatatagtatgcgatagtagagtaaacatttttatagtttttactggattcatacatcgtctacccaattcggttataaatgaaattgtcgccaatcttacacccaaccccttgttatccattagcatagtattaacttcgttatttatgtcataaactgtaaatgattttgtagatgccatatcatacatgatattcatgtccctattataatcattactaactttatcacaatatatgttgataatatctatatatgatctagtctttgtgggcaactgtctatacaagtcgtctaaacgttgtttactcatatagtatcgaacagccatcattacatggtcccgttccgttgatagataatcgagtatgttagtggacttgtcaaatctatataccatattttctggaagtggatatacatagtcgtgatcaacattattgctagcctcatcttctatatcctgtactataccattatctatatcatctacataatctatgatattattacacataaacatcgacaacatactattgtttattatctaagtcctgttgatccaaacccttgatctcctctatttgtactatctagagattgtacttcttccagttctggataatatatacgttgatagattagctgagctattctatctccagtatttacattaaacgtacattttccattattaataagaatgactcctatgtttcccctataatcttcgtctattacaccacctcctatatcaatgccttttagtgacagaccagacctaggagctattctaccatagcagaacttaggcatggacatactaatatctgtcttaattaactgtctttctcctggagggatagtataatcgtaagcgctatacaaatcatatccggcagcacccggcgattgcctagtaggagatttagctctgttagtttccttaacaaatctaactggtgagttaatattcatgttgaacataaaactaatattttatttcaaaattatttaccatcccatatattccatgaataagtgtgatgattgtacacttctatagtatctatatacgatccacgataaaatcctcctatcaatagcagtttattatccactatgatcaattctggattatccctcggataaataggatcatctatcagagtccatgtattgctggattcacaataaaattccgcatttctaccaaccaagaataaccttctaccgaacactaacgcgcatgatttataatgaggataataagtggatggtccaaactgccactgatcatgattgggtagcaaatattctgtagttgtatcagtttcagaatgtcctcccattacgtatataacattgtttatggatgccactgctggattacatctaggtttcagaagactcggcatattaacccaagcagcatccccgtggaaccaacgctcaacagatgtgggatttggtagacctcctactacgtataatttattgttagcgggtatcccgctagcatacagtctggggctattcatcggaggaattggaatccaattgtttgatatataatttacagctatagcattgttatgtatttcattgttcatccatccaccgatgagatatactacttctccaacatgagtacttgtacacatatggaatatatctataatttgatccatgttcataggatactctatgaatggatacttgtatgatttgcgtggttgtttatcacaatgaaatattttggtacagtctagtatccattttacattatttatacctctgggagaaagataatttgacctgattacatttttgataaggagtagcagatttcctaatttatttcttcgcctcatataccacttaatgacaaaatcaactacataatcctcatctggaacatttagttcatcgctttctagaataagtttcatagatagataatcaaaattgtctatgatgtcatcttccagttccaaaaagtgtttggcaataaagtttttagtatgacataagagattggatagtccgtattctatacccatcatgtaacactcgacacaatattcctttctaaaatctcgtaagataaagtttatacaagtgtagatgataaattctacagaggttaatatagaagcacgtaataaattgacgacgttatgactatctatatatacctttccagtatatgagtaaataactatagaagttaaactgtgaatgtcaaggtctagacaaacccttgtaactggatctttatttttcgtgtatttttgacgtaaatgtgtgcgaaagtaaggagataactttttcaatatcgtagaattgactattatattgcctcctatggcatcaataattgttttgaatttcttagtcatagacaatgctaatatattcttacagtacacagtattgacaaatatcggcatttatgtttctttaaaagtcaacatctagagaaaaatgattatctttttgagacataactcccattttttggtattcacccacacgtttttcgaaaaaattagtttttccttccaatgatatattttccatgaaatcaaacggattggtaacattataaatttttttaaatcccaattcagaaatcaatctatccgcgacgaattctatatatgttttcatcatttcacaattcattcctataagtttaactggaagagccgcagtaagaaattcttgttcaatggatactgcatctgttataatagatctaacggtttcttcactcggtggatgcaataaatgtttaaacatcaaacatgcgaaatcgcagtgcagaccctcgtctctactaattagttcgttggaaaacgtgagtccgggcattaggccacgctttttaagccaaaatatggaagcgaatgatccagaaaagaaaattccttctactgcagcaaaggcaataagtctctctccataaccggcgctgtcatgtatccacttttgagcccaatcggccttcttttttacacaaggcatcgtttctatggcattaaagagatagtttttttcattactatctttaacataagtatcgatcaaaagactatacatttccgaatgaatgttttcaatggccatctgaaatccgtagaaacatctagcctcggtaatctgtacttctgtacaaaatcgttccgccaaattttcattcactattccgtcactggctgcaaaaaacgccaatacatgttttataaaatatttttcgtctggtgttagtttattccaatcattgatatctttagatatatctacttcttccactgtccaaaatgatgcctctgcctttttatacatgttccagatgtcatgatattggattgggaaaataacaaatctatttggatttggtgcaaggatgggttccataactaaattaacaataacaataaattttttttcagttatctatatgcctgtacttggattttttgtacatcgatatcgccgcaatcactacaataattacaagtattattgatagcattgttattagtactatcataattaaattatctacattcatgggtgctgaataatcgttattatcatcattatcattttgtaattgtgacatcatactagataaatcgtttgcgagattgttgtgggaagcgggcatggaggatgcattatcattattatttaacgccttccatttggattcacaaatgttacgcacattcaacattttatggaaactataattttgtgaaaacaaataacaagaaaactcgtcatcgttcaaatttttaacgatagtaaaccgattaaacgtcgagctaatttctaacgctagcgactctgttggatatgggtttccagatatatatcttttcagttcccctacgtatctataatcatctgtaggaaatggaagatatttccatttatctactgttcctaatatcatatgtggtggtgtagtagaaccattaagcgcgaaagatgttatttcgcatcgtattttaacttcgcaataatttctggttagataacgcactctaccagtcaagtcaatgatattagcctttacagatatattcatagtagtcgtaacgatgactccatcttttagatgcgatactcctttgtatgtaccagaatcttcgtacctcaaactcgatatatttaaacaagttaatgagatattaacgcgttttatgaatgatgatatataaccagaagttttatcctcggtggctagcgctataaccttatcattataataccaactagtgtgattaatatgtgacacgtcagtgtgggtacaaatatgtacattatcgtctacgtcgtattcgatacatccgcatacagccaacaaatataaaatgacaaatactctaacgccgttcgtacccatcttgatgcggtttaataaatgttttgatttcaatttattgtaaaaaaagattcggttttatactgttcgatattctcattgcttatattttcatctatcatctccacacagtcaaatccgtggttagcatgcacctcatcaaccggtaaaagactatcggactcttctatcattataactctagaatatttaatttggtcattattaatcaagtcaattatcttatttttaacaaacgtgagtattttactcattttttataaaaacttttagaaatatacagactctatcgtgtgtctatatcttctttttatatccaatgtatttatgtctgatttttcttcatttatcatatataatggtccaaattctacacgtgcttcggattcatccagatcattaaggttcttataattgtaacatccttctcttccctcttctacatcttccttcttattcttattcttagcgtcacagaatctaccacagcaggatcccatgacgagcgtcatattaaactaatccattttcaattataatatatgattagtaatgaccattaaaataaaaaatattcttcataaccggcaagaaagtgaaaagttcacattgaaactatgtcagtagtatacatcatgaaatgatgatatatatatactctattttggtggaggattatatgatataattcgtggataatcatttttaagacacatttctttattcgtaaatcttttcacgttaaatgagtgtccatattttgcaatttcttcatatgatggcggtgtacgtggacgaggctgctcctgttcttgttgtggtcgccgactgtcgtgtctgcgtttagatccctccattatcgcgattgcgtagatggagtactattttataccttgtaattaaatttttttattaattaaacgtataaaaacgttccgtatctgtatttaagagccagatttcgtctaatagaacaaatagctacagtaaaaataactagaataattgctacacccactagaaaccacggatcgtaatacggcaatcggttttcgataataggtggaacgtatattttatttaaggacttaacaattgtctgtaaaccacaatttgcttccgcggatcctgtattaactatctgtaaaagcatatgttgaccgggcggagccgaacattctccgatatctaatttctgtatatctataatattattaacctccgcatacgcattacagttcttttctagcttggataccgcactaggtacatcgtctagatctattcctatttcctcagcgatagctcttctatccttttccggaagcaatgaaatcacttcaataaatgattcaaccatgagtgtgaaactaagtcgagaattactcatgcatttgttagttattcggagcgcgcaatttttaaactgtcctataacctctcctatatgaatagcacaagtgacattagtagggatagaatgttgagctaatttttgtaaataactatctataaaaagattatacaaagttttaaactctttagtttccgccatttatccagtctgagaaaatgtctctcataataaatttttccaagaaactaattgggtgaagaatggaaacctttaatctatatttatcacagtctgttttggtacacatgatgaattcttccaatgccgtactaaattcgatatctttttcgatttctggatatgtttttaataaagtatgaacaaagaaatggaaatcgtaataccagttatgtttaactttgaaattgttttttattttcttgttaatgattccagccacttgggaaaagtcaaagtcgtttaatgccgatttaatacgttcattaaaaacaaactttttatcctttagatgaattattattggttcattggaatcaaaaagtaagatattatcgggtttaagatctgcgtgtaaaaagttgtcgcaacagggtagttcgtagattttaatgtataacagagccatctgtaaaaagataaactttatgtattgtaccaaagatttaaatcctaatttgatagctaactcggtatctactttatctgccgaatacagtgctaggggaaaaattataatgtttcctctttcatattcgtagttagttctcttttcatgttcgaaaaagtgaaacatgcggttaaaatagtttataacattaatattactgttaataactgccggataaaagtgggatagtaatttcacgaatttgatactgtcctttctctcgttaaacgcctttaaaaaaactttagaagaatatctcaatgagagttcctgaccatccatagtttgtatcaataatagcaacatatgaagaacacgtttatacagagtatgtaaaaatgttaatttatagtttaatcccatggcccacgcacacacgattaattttttttcatctccctttagattgttgtatagaaatttgggtactgtgaactccgccgtagtttccatgggactatataattttgtggcctcgaatacaaattttactacatagttatctatcttaaagactataccatatcctcctgtagatatgtgataaaaatcgtcgtttataggataaaatcgtttatccttttgttggaaaaaggatgaattaatgtaatcattctcttctatctttagtagtgtttccttattaaaattcttaaaataatttaacaatctaactgacggagcccaattttggtgtaaatctaattgggacattatattgttaaaatacaaacagtctcctaatataacagtatctgataatctatggggagacatccattgatattcaggggatgaatcattggcaacacccatttattgtacaaaaagccccaatttacaaacgaaagtccaggtttgatagagacaaacaattaactattttgtctctgtttttaacacctccacagtttttaatttctttagtaatgaaattattcacaatatcagtatcttctttatctaccagagattttactaacttgataaccttggctgtctcattcaatagggtagtaatatttgtatgtgtgatattgatatctttttgaattgtttcttttagaagtgattctttgatggtgccagcatacgaattacaataatgcagaaactcggttaacatgcaggaattatagtaagccaattccaattgttgcctgtgttgtattagagtgtcaatatgagcaatggtgtccttgcgtttctctgatagaatgcgagcagcgattttggcgttatcatttgacgatatttctggaatgacgaatcctgtttctactaactttttggtaggacaaagtgaaacaatcaagaagatagcttctcctcctatttgtggaagaaattgaactcctctagatgatctactgacgatagtatctccttgacagatattggaccgaattacagaagtacctggaatgtaaagccctgaaaccccctcattttttaagcagattgttgccgtaaatcctgcactatgcccaagatagagagctcctttggtgaatccatctctatgtttcagtttaaccaagaaacagtcagctggtctaaaatttccatctctatctaatacagcatctaacttgatgtcaggaactatgaccggtttaatgttatatgtaacattgagtaaatccttaagttcataatcatcactgtcatcagttatgtacgatccaaacaatgtttctaccggcatagtggatacgaagatgctatccatcagaatgtttccctgattagtattttctatatagctattcttctttaaacgattttccaaatcagtaactatgttcatttttttaggagtaggacgcctagccagtatggaagaggattttctagatcctctcttcaacatctttgatctcgatggaatgcaaaaccccatagtgaaacaaccaacgataaaaataatattgtttttcactttttataattttaccatctgactcatggattcattaatatctttataagagctactaacgtataattctttataactgaactgagatatatacaccggatctatggtttccataattgagtaaatgaatgctcggcaataactaatggcaaatgtatagaacaacgaaattatactagagttgttaaagttaatattttctatgagctgttccaataaattatttgttgtgactgcgttcaagtcataaatcatcttgatactatccagtaaaccgtttttaagttctggaatattatcatcccattgtaaagcccctaattcgactatcgaatatcctgctctgatagcagtttcaatatcgacggacgtcaatactgtaataaaggtggtagtattgtcatcatcgtgataaactacgggaatatggtcgttagtaggtacggtaactttacacaacgcgatatataactttccttttgtaccatttttaacgtagttgggacgtcctgcagggtattgttttgaagaaatgatatcgagaacagatttgatacgatatttgttggattcctgattattcactataatataatctagacagatagatgattcgataaatagagaaggtatatcgttggtaggataatacatccccattccagtattctcggatactctattgatgacactagttaagaacatgtcttctattctagaaaacgaaaacatcctacatggactcattaaaacttctaacgctcctgattgtgtctcgaatgcctcgtacaaggatttcaaggatgccatagattctttgaccaacgatttagaattgcgtttagcatctgatttttttattaaatcgaatggtcggctctctggtttgctaccccaatgataacaatagtcttgtaaagataaaccgcaagaaaatttatacgcatccatccaaataaccctagcaccatcggatgatattaatgtattattatagattttccatccacaattattgggccagtatactgttagcaacggtatatcgaatagattactcatgtaacctactagaatgatagttcgtgtactagtcataatatctttaatccaatctaaaaaatttaaaattagattttttacactgttaaagttaacaaaagtattacccgggtacgtggatatcatatatggcattggtccattatcagtaatagctccataaactgatacggcgatggtttttatatgtgtttgatctaacgaggaagaaattcgcgcccacaattcatctctagatatgtatttaatatcaaacggtaacacatcaatttcgggacgcgtatatgtttctaaatttttaatccaaatataatgatgacctatatgccctattatcatactgtcaactatagtacacctagggaacttacgatacatctgtttcctataatcgttaaattttacaaatctataacatgctaaaccttttgacgacagccattcattaatttctgatatggaatctgtattctcgataccgtatcgttctaaagccagtgctatatctccctgttcgtgggaacgctttcgtataatatcgatcaacggataatctgaagtttttggagaataatatgactcatgatctatttcgtccataaacaatctagacataggaattggaggcgatgatcttaattttgtgcaatgagtcgtcaatcctataacttctaatcttgtaatattcatcatcgacataatactatctatgttatcatcgtatattagtataccatgaccttcttcatttcgtgccaaaatgatatacagtcttaaatagttacgcaatatctcaatagtttcataattgttagctgttttcatcaaggtttgtatcctgtttaacatgatggcgttctataacgtctctattttctatttttaattttttaaatttttaacgatttactgtggctagatacccaatctctctcaaatatttttttagcctcgcttacaagctgtttatctatactattaaaactgacgaatccgtgattttggtaatgggttccgtcgaaatttgccgaagtgatatgaacatattcgtcgtcgactatcaacaattttgtattattctgaatagtgaaaaccttcacagatagatcattttgaacacacaacgcatctagacttttggcggttgccatagaatatacgtcgttcttatcccaattaccaactagaagtctgatcttaactcctctattaatggctgcttctataatggagttgtaaatgtcgggccaatagtagctattaccgtcgacacgtgtagtgggaactatggccaaatgttcaatatctatactagtcttagctgacctgagtttatcaataactacatcggtatctagatctctagaatatcccaataggtgttccggagaatcagtaaagaacactccacctataggattcttaatatgatacgcagtgctaactggcaaacaacaagccgcagagcataaattcaaccatgaattttttgcgctattaaaggctttaaaagtatcaaatcttctacgaagatctgtggccagcgggggataatcagaatatacacctaacgttttaatcgtatgtatagatcctccagtaaatgacgcgtttcctacataacatctttcatcatctgacacccaaaaacaaccgagtagtagtcccacattattttttttatctatattaacggttataaaatttatatccgggcagtgactttgtagctctcccagatttcttttccctcgttcatctagcaaaactattattttaatccctttttcagatgcctcttttagtttatcaaaaataagcgctcccctagtcgtactcagaggattacaacaaaaagatgctatgtatatatatttcttagctagagtgataatttcgttaaaacattcaaatgttgttaaatgatcggatctaaaatccatattttctggtagtgtttctaccagcctacattttgctcccgcaggtaccgatgcaaatggccacatttagttaacataaaaacttatacatcctgttctatcaacgattctagaatatcatcggctatatcgctaaaattttcatcaaagtcgacatcacaacctaactcagtcaatatattaagaagttccatgatgtcatcttcgtctatttctatatccgtatccattgtagattgttgaccgattatcgagtttaaatcattactaatactcaatccttcagaatacaatctgtgtttcattgtaaatttataggcggtgtatttaagttggtagattttcaattatgtattaatatagcaacagtagttcttgctcctccttgattctagcatcctcttcattattttcttctacgtacataaacatgtccaatacgttagacaacacaccgacgatggcggccgcaggatcctcaagagccagactcacatttcagctgcttttccaggccacagatgatcagttccaggccaaaaaggaatgcaggctcagccccttggtggtcaaacaactcaatagcttgccgcagcagtggtggcatggagtcagtggtgggggtctccctctcctccttggcaacttggtgctcctggtcctccagcacacagcccaaggtgaagtggcccacagcagagagggcatacaaggcattttccagggagaagccttgttggcacaggaatgccagctggttctccagggtctcatactgcttctctgtaggcctggtgcccaagtgaactttggcaccatcccggtgggagagcaaggcacatctgaagctcttggcattgttcctcaggaagtcctgccaggactccccttccagagggcagaagtgggtgtggtgcctgtccaacatctcaatggccagggcatcaagcagagccctcttgttcttcacatgccagtacagggtaggctgctccacacccagcttctgggccagcttcctggtggtcaagccctcaatgccaacttcattcaggagctccaaggcagagttgatgactttgctcttgtccagtctggacatctcgagttatgatctacttccttaccgtgcaataaattagaatatattttctacttttacgagaaattaattattgtatttattatttatgggtgaaaaacttactataaaaagcgggtgggtttggaattagtgaaagcttacagacacgaatatgactaaaccgatgaccatttaaaaacccctctctagctttcacttaaactgtatcgatcattcttttagcacatgtataatataaaaacattattctatttcgaatttaggcttccaaaaatttttcatccgtaaaccgataataatatatatagacttgttaatagtcggaataaatagattaatgcttaaactatcatcatctccacgattagagatacaatatttacattctttttgctgtttcgaaactttatcaatacacgttaatacaaacccaggaaggagatattgaaactgaggctgttgaaaatgaaacggtgaatacaataattcagataatgtaaaatcatgattccgtattctgatgatattagaactgctaatggatgtcgatggtatgtatctaggagtatctattttaacaaagcatcgatttgctaatatacaattatccttttgattaattgttattttattcatattcttaaaaggtttcatatttatcaattcttctacattaaaaatttccatttttaatttatgtagccccgcaatactcctcattacgtttcattttttgtctataatatccattttgttcatctcggtacatagattatccaattgagaagcgcatttagtagttttgtacattttaagtttattgacgaatcgtcgaaaactagttatagttaacattttattatttgataccctgatattaatacccctgccgttactattatttataactgatgtaatccacgtaacattggaattaactatcgatagtaatgcatcgacgcttccaaaattgtctattataaactcaccgataatttttttattgcatgttttcatattcattaggattatcaaatctttaatcttattacgattgtatgcgttgatattacaagacgtcattctaaaagacggaggatctccatcaaatgccagacaatcacgtacaaagtacatggaaataggttttgttctattgcgcatcatagatttatatagaacacccgtagaaatactaatttgttttactctataaaatactaatgcatctatttcatcgttttgtataacgtctttccaagtgtcaaattccaaatttttttcattgatagtaccaaattcttctatctctttaactacttgcatagataggtaattacagtgatgcctacatgccgttttttgaaactgaatagatgcgtctagaagcgatgctacgctagtcacaatcaccactttcatatttagaatatatatatgtaaaaatatagtagaatttcattttgtttttttctatgctataaatgaattctcattttgcatctgctcatactccgttttatattaataccaaagaaggaagatatctggttctaaaagccgttaaagtatgcgatgttagaactgtagaatgcgaaggaagtaaagcttcctgcgtactcaaagtagataaaccctcatcgcccgcgtgtgagagaagaccttcgtccccgtccagatgcgagagaatgaataaccctggaaaacaagttccgtttatgaggacggacatgctacaaaatatgttcgcggctaatcgcgataatgtagcttctagacttttgtcctaaaatactattatatccttttcgatattaataaatccgtgtcgtccaggttttttatctctttcagtatgtgaatagataggtattttatctctattcatcatcgaatttaagagatccgataaacattgtttgtattctccagatgtcagcatctgatacaacaatatatgtgcacataaacctctggcacttatttcatgtaccttccccttatcactaaggagaatagtatttgagaaatatgtatacatgatattatcatgaattagatatacagaatttgtaacactctcgaaatcacacgatgtgtcggcgttaagatctaatatatcactcgataacacattttcatctagatacactagacattttttaaagctaaaatagtctttagtagtaacagtaactatgcgattattttcatcgatgatacatttcatcggcatattattacgcttaccatcaaagactataccatgtgtatatctaacgtattctagcatggttgccatacgcgcattaaacttttcaggatctttggatagatcttccaatctatctatttgagaaaacatttttatcatgttcaatagttgaaacgtcggatccactatatagatattatctataaagattttaggaactacgttcatggtatcctggcgaatattaaaactatcaatgatatgattatcgttttcatcttttatcaccatatagtttctaagatatgggattttacttaatataatattatttcccgtgataaattttattagaaaggccaaatctataagaaaagtcctagaattagtctgaagaatatctatatcgccgtatagtatatttggattaattagatatagagaatatgatccgtaacatatacaacttttattatggcgtctaagatattcttccatcaacttattaacatttttgactagggaagatacattatgacgtcccattacttttgccttgtctattactgcgacgttcatagaatttagcatatctcttgccaattcttccattgatgttacattataagaaattttagatgaaattacatttggagctttaatagtaagaactcctaatatgtccgtgtatgtggtcactaatacagattgtagttctataatcgtaaataatttacctatattatatgtttgagtctgtttagaaaagtagctaagtatacgatcttttatttctgatgcagatgtattaacatcggaaaaaaatctttttttattcttttttactaaagatacaaatatgtctttgttaaaaacagttattttctgaatatttctagcttgtaattttaacatatgatattcgttcacactaggtactctgcctaaataggtttctataatctttaatgtaatattaggaaaagtattctgatcaggattcctattcattttgaggatttaaaactctgattattgtctaatatggtctctacgcaaactttttcacagagcgatagagtttttgataactcgtttttcttaagaaatataaaactactgtctccagagctcgctctatcttttattttatctaattcgatacaaactcctgatactggttcagaaagtaattcattaattttcagtcctttatagaagatatttaatatagataatacaaaatcttcagtttttgatatcgatctgattgatcctagaactagatatattaataacgtgctcattaggcagtttatggcagcttgataattagatatagtatattccagttcatatttattagataccgcattgcccagattttgatattctatgaattcctctgaaaataaatccaaaataactagacattctattttttgtggattagtgtactctcttccctctatcatgttcactactggtgtccacgatgataaatatctagagggaatataatatagtccataggatgccaatctagcaatgtcgaataactgtaattttattcttcgctcttcattatgaattgattcttgaggtataaacctaacacaaattatattattagacttttcgtatgtaatgtctttcatgttataagtttttaatcctggaatagaatctattttaatgaggcttttaaacgcagagttctccaacgagtcaaagcataatactctgttgtttttcttatatacgatgttacgattttcttctttgaatggaataggtttttgaattagtttataattacaacataatagataaggaagtgtgcaaatagtacgcggaaaaaacataatagctcccctgttttcatccatggttttaagtaaatgatcactggcttctttagtcaatggatattcgaacattaaccgtttcatcatcattggacagaatccatatttcttaatgtaaagagtgatcaaatcattgtgtttattgtaccatcttgttgtaaatgtgtattcggttatcggatctgctcctttttctattaaagtatcgatgtcaatctcgtctaagaattcaactatatcgacatatttcatttgtatacacataaccattactaacgtagaatgtataggaagagatgtaacgggaacagggtttgttgattcgcaaactattctaatacataattcttctgttaatacgtcttgcacgtaatctattatagatgccaagatatctatataattattttgtaagatgatgttaactatgtgatctatataagtagtgtaataattcatgtattttgatatatgttccaactctgtctttgtgatgtctagtttcgtaatatctatagcatcctcaaaaaatatattcgcatatattcccaagtcttcagttctatcttctaaaaaatcttcaacgtatggaatataataatctattttacctcttctgatatcattaatgatatagtttttgacactatcttctgtcaattgattcttattcactatatctaagaaacggatagcgtccctaggacgaactactgccattaatatctctattatagcttctggacataattcatctattataccagaattaatgggaactattccgtatctatctaacatagttttaagaaagtcagaatctaagacttgatgttcatatattggttcatacatgaaatgatctctattgatgatagtgactatttcattctctgaaaattggtaactcattctatatatgctttccttgttgatgaaggatagaatatactcaatagaatttgtaccaacaaactgttctcttatgaatcgtatatcatcatctgaaataatcatgtaaggcatacatttaacaattagagacttgtctcctgttatcaatatactattcttgtgataatttatgtgtgaggcaaatttgtccacgttctttaattttgttatagtagatatcaaatccaatggagctacagttcttggcttaaacagatatagtttttctggaacaaattctacaacattattataaaggactttgggtagataagtgggatgaaatcctattttaattaatgcgatagccttgtcctcgtgcagatatccaaacgcttttgtgatagtatggcattcattgtctagaaacgctctacgaatatctgtgacagatatcatctttagagaatatactagtcgcgttaatagtactacaatttgtattttttaatctatctcaataaaaaaattaatatgtatgattcaatgtataactaaactactaactgttattgataactagaatcagaatctaatgatgacgtaaccaagaagtttatctactgccaatttagctgcattatttttagcatctcgtttagattttccatcggccttatcgaatactcttccgtcgatgtctacacaggcataaaatgtaggagagttactaggcccaactgattcaatacgaaaagaccaatctctcctagtaatttggcagtactcattaataacggtgacagggttagcatctttccaatcaataatttttttagccggaataacatcatcaaaagacttatgatcctctctcattgatttttcgcgggatacatcatctattatgacgtcagccatagcatcagcatccggcttatccgcctccgttgtcataaaccaacgaggaggaatatcgtcggagctgtacaccatagcactacgttgaagatcgtacagagctttattaacttctcgcttctccatattaagttgtctagttagttgtgcagcagtagctccttcgattccaatgtttttaatagccgcacacacaatctctgcgtcagaacgctcgtcaatatagatcttagacatttttagagagaactaacgcaaccagcaataaaactgaacctactttatcatttttttattcatcatcctctggtggttcgtcgttcctatcaaatgtagctctgattaacccgtcatctataggtgatgctggttctggagattctggaggagatggattattatctggaagaatctctgttatttccttgttttcatgtatcgattgcgttgtaacattaagattgcgaaatgctctaaatttgggaggcttaaagtgttgtttgcaatctctacacgcgtgtctaactagtggaggttcgtcagctgctctagtttgaatcatcatcggcgtagtattcctacttttacagttaggacacggtgtattgtatttctcgtcgagaacgttaaaataatcgttgtaactcacatcctttattttatctatattgtattctactcctttcttaatgcattttataccgaataagagatagcgaaggaattctttttcggtgccgctagtacccttaatcatatcacatagtgttttatattccaaatttgtggcaatagacggtttatttctatacgatagtttgtttctggaatcctttgagtattctataccaatattattctttgattcgaatttagtttcttcgatattagattttgtattacctatattcttgatgtagtactttgatgatttttccatggcccattctattaagtcttccaagttggcatcatccacatattgtgatagtaattctcggatatcagtagcggctaccgccattgatgtttgttcattggatgagtaactactaatgtatacattttccatttataacacttatgtattaactttgttcatttatattttttcattattatgttgatattaacaaaagtgaatatatatatgttaataattgtattgtggttatacggctacaattttataatgagtgaaagtcagtgtccgatgatcaatgacgatagctttactctgaaaagaaagtatcaaatcgatagtgcggagtcaacaataaaaatggataagaagaggataaagtttcagaatagagccaaaatggtaaaagaaataaatcagacaataagagcagcacaaactcattacgagacattgaaactaggatacataaaatttaagagaatgattatgactactactctagaagatatagcaccatctattccaaataatcagaaaacttataaactattctcggacatttcagccatcggcaaagcatcacagaatccgagtaagatggtatatgctctgctgctttacatgtttcccaatttgtttggagatgatcatagattcattcgttatagaatgcatccaatgagtaaaatcaaacacaagatcttctctcctttcaaacttaatcttattagaatattagtggaagaaagattctataataatgaatgcagatctaataaatggagaataattggaacacaagttgataaaatgttgatagctgaatctgataaatatacaatagatgcaaggtataacctaaaacccatgtatagaatcaagggagaatctgaagaagataccctctttatcaaacagatggtagaacaatgtgtgacatcccaggaattggtggaaaaagtgttgaagatactgtttagagatttgttcaagagtggagaatacaaagcgtacagatacgatgatgatgtagaaaatggatttattggattggatacactaaaattaaacattgttcatgatatagttgaaccatgtatgcctgttcgtaggccagtggctaagatactgtgtaaagaaatggtaaataaatactttgagaatccgctacatattattggtaaaaatcttcaagagtgcattgactttgttagtgaataggcatttcatctttctccaatactaattcaaattgttaaattaataatggatagtataaatagttattagttataagatagtaaaaataattattagaataagagtgtagtatcatagataactctcttctataaaaatggattttattcgtagaaagtatcttatatacacagtagaaaataatatagattttttaaaggatgatacattaagtaaagtaaacaattttaccctcaatcatgtactagctctcaagtatctagttagcaattttcctcaacacgttattactaaggatgtattagctaataccaatttttttgttttcatacatatggtacgatgttgtaaagtgtacgaagcggttttacgacacgcatttgatgcacccacgttgtacgttaaagcattgactaagaattatttatcgtttagtaacgcaatacaatcgtacaaggaaaccgtgcataaactaacacaagatgaaaaatttttagaggttgccgaatacatggacgaattaggagaacttataggcgtaaattatgacttagttcttaatccattatttcacggaggggaacccatcaaagatatggaaatcatttttttaaaactgtttaagaaaacagacttcaaagttgttaaaaaattaagtgttataagattacttatttgggcatacctaagcaagaaagatacaggcatagagtttgcggataatgatagacaaaatatatacactctatttcaacaaactggtagaatcgtccatagcaatctaacagaaacgtttagagattatatctttcccggagataagactagctattgggtgtggttaaacgaaagtatagctaatgatgcggatatcgttcttaatagacacgccattaccatgtatgataaaattcttagttatatatactctgagataaaacaaggacgcgttaataaaaacatgcttaagttagtttatatctttgagcctgaaaaagatatcagagaacttctgctagaaatcatatatgatattcctggagatatcctatctattattgatgcaaaaaacgacgattggaaaaaatattttattagtttttataaagctaattttattaacggtaatacatttattagtgatagaacgtttaacgaggacttattcagagttgttgttcaaatagatcccgaatatttcgataatgaacgaattatgtctttattctctacgagtgctgcggacattaaacgatttgatgagttagatattaataacagttatatatctaatataatttatgaggtgaacgatatcacattagatacaatggatgatatgaagaagtgtcaaatctttaacgaggatacgtcgtattatgttaaggaatacaatacatacctgtttttgcacgagtcggatcccatggtcatagagaacggaatactaaagaaactgtcatctataaaatccaagagtagacggctgaacttgtttagcaaaaacattttaaaatattatttagacggacaattggctcgtctaggtcttgtgttagatgattataaaggagacttgttagttaaaatgataaaccatcttaagtctgtggaggatgtatccgcattcgttcgattttctacagataaaaaccctagtattcttccatcgctaatcaaaactattttagctagttataatatttccatcatcgtcttatttcaaaggtttttgagagataatctatatcatgtagaagaattcttggataaaagcatccatctaaccaagacggataagaaatatatacttcaattgataagacacggtagatcatagaacagaccaaatatattattaataatttgtatatacatagatataattatcacacatttttgataaatgggaactgctgcaacaattcagactcccaccaaattaatgaataaagaaaatgcagaaatgattttggaaaaaattgttgatcatatagttatgtatattagtgacgaatcaagtgattcagaaaataatcctgaatatattgattttcgtaacagatacgaagactatagatctctcattataaaaagtgatcacgagtttgtaaagctatgtaaaaatcatgcggagaaaagttctccagaaacgcaacaaatgattatcaaacacatatacgaacaatatcttattccagtatctgaagtactattaaaacctataatgtccatgggtgacataattacatataacggatgtaaagacaatgaatggatgctagaacaactctctaccctaaactttaacaatctccgcacatggaactcatgtagcataggcaatgtaacgcgtctgttttatacattttttagttatctgatgaaagataaactaaatatataagtataatcccattctaatactttaacctgatgtattagcatcttattagaatattaacctaactaaaagacataacataaaaactcattacatagttgataaaaagcggtaggatataaatattatggctgccaccgttccgcgttttgacgacgtgtacaaaaatgcacaaagaagaattctagatcaagaaacattttttagtagaggtctaagtagaccgttaatgaaaaacacatatctatttgataattacgcgtatggatggataccagaaactgcaatttggagtagtagatacgcaaacctagatgctagtgactattatcccatttcgttgggattacttaaaaagttcgagtttctcatgtctctatataaaggtcctattcccgtatatgaagaaaaagtaaatactgaattcatagccaatggatcgttctctggtagatacgtatcatatcttcgaaagttttctgcccttccaacaaacgagtttattagttttttgttactgacttccattccaatctataatatcttgttctggtttaaaaacacacagtttgatattactaaacacacattattcagatacgtctatacagataatgccaaacacctggcgttggctaggtatatgcatcaaacaggagactataagcctttgtttagtcgtctcaaagagaattatatatttaccggtcccgttccaataagtatcaaagatatagatcaccctaatcttagtagagcaagaagtccatccgattatgagacattagctaatattagtactatattgtactttaccaagtatgatccggtattaatgtttttattgttttacgtacctgggtattcaattactacaaaaattactccagccgtagaatatctaatggataaactgaatctaacaaagagcgacgtacaactgttgtaaattattttatgcttcgtaaaatgtaggttttgaaccaaacattctttcaaagaatgagatgcataaaactttattatccaatagattgactatttcggacgtcaatcgtttaaagtaaacttcgtaaaatattctttgatcactgccgagtttaaaacttctatcgataattgtctcatatgttttaatatttacaagttttttggtccatggtacattagccggacaaatatatgcaaaataatatcgttctccaagttctatagtttctggattatttttattatattcagtaactaaatacatattagggttatctgcggatttataatttgagtgatgcattctactcaacataaataattctagaggagacgatctactatcaaattcggatcgtaaatctgtttctaaagaacggagaatatctatacatacctgattagaattcatccgtccttcagacaacatctcagacagtctggttttgtacatcttaatcatattcttatgaaacttggaaacatctcttctagtttcactagtacctttattaattctctcaggtacagattttgaattcgacgatgctgagtatttcatcgttgtatatttcttcttcgattgcataatcagattcttatataccgcctcaaactctattttaaaattattaaacaatactctattattaatcagtcgttctaactctttcgctatttctatagacttatctacatcttgactgtctatctctgtaaacacggagtcggtatctccatacacgctacgaaaacgaaatctgtaatctataggcaacgatgttttcacaatcggattaatatctctatcgtccatataaaatggattacttaatggattggcaaaccgtaacataccgttagataactctgctccatttagtaccgattctagatacaagatcattctacgtcctatggatgtgcaactcttagccgaagcgtatgagtatagagcactatttctaaatcccatcagaccatatactgagttggctactatcttgtacgtatattgcatggaatcatagatggccttttcagttgaactggtagcctgttttagcatctttttatatctggctctctctgccaaaaatgttcttaatagtctaggaatggttccttctatcgatctatcgaaaattgctatttcagagatgaggttcggtagtctaggttcacaatgaaccgtaatatatctaggaggtggatatttctgaagcaatagctgattatttatttcttcttccaatctattggtactaacaacgacaccgactaatgtttccggagatagatttccaaagatacacacattaggatacagactgttataatcaaagattaatacattattactaaacattttttgttttggagcaaataccttaccgccttcataaggaaacttttgttttgtttctgatctaactaagatagttttagtttccaacaatagctttaacagtggacccttgatgactgtactcgctctatattcgaataccatggattgaggaagcacatatgttgacgcacccgcgtctgtttttgtttctactccataatactcccacaaatactgacacaaacaagcatcatgaatacagtatctagccatatctaaagctatgtttagattataatccttatacatctgagctaaatcaacgtcatcctttccgaaagataatttatatgtatcattaggtaaagtaggacataatagtacgactttaaatccattttcccaaatatctttacgaattactttacatataatatcctcatcaacagtcacataattacctgtggttaaaacctttgcaaatgcagcggctttgcctttcgcgtctgtagtatcgtcaccgatgaacgtcatttctctaactcctctatttaatactttacccatgcaactgaacgcgttcttggatatagaatccaatttgtacgaatccaatttttcaaatttttgaatgaatgaatatagatcgaaaaatatagttccattattgttattaacgtgaaacgtagtattggccatgccgcctactcccttatgactagactgatttctctcataaatacagagatgtacagcttcctttttgtccggagatctaaagataattttctctcctgttaataactctagacgattagtaatatatctcagatcaaagttatgtccgttaaaggtaacgacgtagtcgaacgttagttccaacaattgtttagctattcgtaacaaaactatttcagaacatagaactagttctcgttcgtaatccatttccattagtgactgtatcctcaaacatcctctatcgacggcttcttgtatttcctgttccgttaacatctcttcattaatgagcgtaaacaataatcgtttaccacttaaatcgatataacagtaacttgtatgcgagattgggttaataaatacagaaggaaacttcttatcgaagtgacactctatatctagaaataagtacgatcttgggatatcgaatctaggtatttttttagcgaaacagttacgtggatcgtcacaatgataacatccattgttaatctttgtcaaatattgctcgtccaacgagtaacatccgtctggagatatcccgttagaaatataaaaccaactaatattgagaaattcatccatggtggcattttgtatgctgcgtttctttggctcttctatcaaccacatatctgcgacggagcattttctatctttaatatctagattataacttattgtctcgtcaatgtctatagttctcatctttcccaacggcctcgcattaaatggaggaggagacaatgactgatatatttcgtccgtcactacgtaataaaagtaatgaggaaatcgtataaatacggtctcgccatttcgacatctggatttcagatataaaaatctgttttcaccgtgactttcaaaccaattaatgcaccgaacatccatttatagaatttagaaatatattttcatttaaatgaatcccaaacattggggaagagccgtatggaccattatttttatagtactttcgcaagcgggtttagacggcaacatagaagcgtgtaaacgaaaactatatactatagttagcactcttccatgtcctgcatgtagacggcacgcgactatcgctatagaggacaataatgtcatgtctagcgatgatctgaattatatttattattttttcatcagattatttaacaatttggcatctgatcccaaatacgcgatcgatgtgacaaaggttaaccctttataaacttaacccattataaaacttatgattagtcacaactgaaataaccgcgtgattattttttggtataattctacacggcatggtttctgtgactatgaattcaacccccgttacattagtgaaatctttaacaaacagcaagggttcgtcaaagacataaaactcattgtttacaatcgaaatagaccccctatcacacttaaaataaaaaatatccttatcctttaccaccaaataaaattctgattggtcaatgtgaatgtattcacttaacagttccacaaatttatttattaactccgaggcacatacatcgtcggtattttttatggcaaactttactcttccagcatccgtttctaaaaaaatattaacgagttccatttatatcatccaatattattgaaatgacgttgatggacagatgatacaaataagaaggtacggtacctttgtccaccatctcctccaattcatgctctattttgtcattaactttaatgtatgaaaacagtacgccacatgcttccatgacagtgtgtaacactttggatacaaaatgtttgacattagtataattgtccaagactgtcaatctataatagatagtagctataatatattctatgatggtattgaagaagatgacaaccttggcatattgatcatttaacacagacatggtatcaacagatagcttgaatgaaagagaatcagtaattggaataagcgtcttctcgatagagtgtccgtataccaacatgtctgatattttgatgtattccattaaattatttagttttttctttttattctcgttaaacagcatttctgtcaacggaccccaacatcgttgaccgattaagttttgattgatttttccgtgtaaggcgtatctagtcagatcgtatagcctatccaataatccatcgtctgtgtgtagatcacatcgtacactttttaattctctatagaagagcgacagacatctggagcaattacagacagcaatttctttattctctacagatgtaagatacttgaagacattcctatgatgatgcagaattttggataacacggtattgatggtatctgttaccataattcctttgatggctgatagtgtcagagcacaagatttccaatctttgacaatttttagcaccattatctttgttttgatatctatatcagacagcatggtgcgtctgacaacacagggattaagacggaaagatgaaatgattctctcaacatcttcaatagataccttgctattttttctggcattatctatatgtgcgagaatatcctctagagaatcagtatcctttttgatgatagtggatctcaatgacatgggacgtttaaaccttcttattctatcaccagattgcatggtgatttgtcttctttcttttatcataatgtaatctctaaattcatcggcaaattgtctatatctaaaatcataatatgagatgtttacctctacaaatatctgttcgtccaatgttagagtatttacatcagttttgtattccaaattaaacatggcaacggatttaattttatattcctctattaagtcctcgtcgataataacagaatgtagataatcatttaatccgtcgtacatggttggaagatgcttgttgacaaaatctttaattgtcttgatgaaggtgggactatatctaacatcttgattaataaaatttataacattgtccataggatactttgtaactagttttatacacatctcttcatcggtaagtttagacagaatatcgtgaacaggtggtatattatattcatcagatatacgaagaacaatgtccaaatctatattgtttaatatattatatagatgtagcgtagctcctacaggaatatctttaactaagtcaatgatttcatcaaccgttagatctattttaaagttaatcatataggcattgatttttaaaaggtatgtagccttgactacattctcattaattaaccattccaagtcattgtgtgtaagaagattatattctatcataagcttgactacatttggtcccgataccattaaagaattcttatgatataaggaaacagattttaggtactcatctactctacaagaattttggagagccttaacgatatcagtgacgtttattatttcaggaggaaagaatctaacattgagaatatcggaattaatagcttccagatacagtgattttggcaatagtccgtgtaatccataatccagtaacacgagctggtgcttgctagacaccttttcaatgtttaatttttttgaaataagctttgataaagccttcctcgcaaattccggatacatgaacatgtcggcgacatgattaagtattgttttttcattatttttatattttctcaacaagttctcaataccccaatagatgatagaatatcacccaatgcgtccatgttgtctatttccaacaggtcgctatatccaccaatagaagtttttccaaaaaagattctaggaacagttctaccaccagtaatttgttcaaaataatcccgcaattcattttcgggtttaaattctttaatatcgacaatttcatacgctcctcttttgaaactaaacttatttagaatatccagtgcatttctacaaaaaggacatgtatacttgacaaaaattgtcactttgttattggccaacctttgttgtacaaattcctcggccattttaatatttaagtgatataaaactatctcgacttatttaactctttagtcgagatatatggacgcagatagctatatgatagccaactacagaaggcaaacgctataaaaaacataattacgacgagcatatttataaatatttttattcagcattacttgatatagtaatattaggcacagtcaaacattcaaccactctcgatacattaactctctcattttctttaacaaattctgcaatatcttcgtaaaaagattcttgaaactttttagaatatctatcgactctagatgaaatagcgttcgtcaacatactatgttttgtatacataaaggcgcccattttaacagtttctagtgacaaaatgctagcgatcctaggatcctttagaatcacatagattgacgattcgtctctcttagtaactctagtaaaataatcatacaatctagtacgcgaaataatattatccttgacttgaggagatctaaacaatctagttttgagaacatcgataagttcatcgggaatgacatacatactatctttaatagaactcttttcatccagttgaatggattcgtccttaaccaactgattaatgagatcttctattttatcattttccagatgatatgtatgtccattaaagttaaattgtgtagcgcttctttttagtctagcagccaatactttaacatcactaatatcgatatacaaaggagatgatttatctatggcattaagaattcgtttttcgacatccgtcaaaaccaattcctttttgcctgtatcatccagttttccatcctttgtaaagaaattattttctactagactattaataagactgataaggattcctccataattgcacaatccaaactttttaacaaaactagactttacgagatctacaggaatgcgtacttcaggttttttagcttgtgattttttcttttgcggacattttctagtaaccaactcatctaccatttcattgattttagcagtgaaataagctttcaatgcacgggcactgatactattgaaaacgagttgatcttcaaattccgccatttaagttcaccaaacaacttttaaatacaaatatatcaatagtagtagaataagaactataaaaaaaataataattaaccaaccccaacaaccggtattattagttgatgtggtagttttctcatcacttagaacagatttaacaatttctataaagtctgtcaaatcatcttccggagaccccataaatacaccaaatatagcggcgtacaacttatccatttatacattgaatattggcttttctttatcgctatcttcatcatattcatcatcaatatcaacaagtcccagattacgagccagatcttcttctacattttcagtcattgatacacgttcactatctccagagagtccgataacgttagccaccacttctctatcaatgattagtttcttgagcgcgaaagtaatttttgtttccgttccggatctatagaagacgataggtgtgataattgccttggccaattgtctttctcttttactgagtgattctagttcaccttctatagatctgagaatggatgattctccagtcgaaacatattctaccatggatccgtttaatttgttgatgaagatggattcatccttaaatgttttctctgtaatagtttccaccgaaagactatgcaaagaatttggaatgcgttccttgtgcttaatgtttccatagacggcttctagaagttgatacaacataggactagccgcggtaacttttatttttagaaagtatccatcgcttctatcttgtttagatttatttttataaagtttagtctctccttccaacataataaaagtggaagtcatttgactagataaactatcagtaagttttatagagatagacgaacaattagcgtattgagaagcatttagtgtaacgtattcgatacattttgcattagatttactaatcgattttgcatactctataacacccgcacaagtctgtagagaatcgctagatgcagtaggtcttggtgaagtttcaactctcttcttgattaccttactcatgattaaacctaaataattgtactttgtaatataatgatatatattttcactttatctcatttgagaataaaaatgtttttgtttaaccactgcatgatgtacagatttcggaatcgcaaaccaccagtggttttattttatccttgtccaatgtgaattgaatgggagcggatgcgggtttcgtacgtagatagtacattcccgtttttagaccgagactccatccgtaaaaatgcatactcgttagtttggaataactcggatctgctatatggatattcatagattgactttgatcgatgaaggctcccctgtctgcagccatttttatgatcgtcttttgtggaatttcccaaatagttttataaactcgcttaatatcttctggaaggtttgtattctgaatggatccaccatctgccataatcctattcttgatctcatcattccataattttctctcggttaaaactctaaggagatgcggattaactacttgaaattctccagacaatactctccgagtgtaaatattactggtatacggttccaccgactcattatttcccaaaatttgagcagttgatgcagtcggcataggtgccaccaataaactatttctaagaccgtatgttctgattttatcttttagaggttcccaattccaaagatccgacggtacaacattccaaagatcatattgtagaataccgttactggcgtacgatcctacatatgtatcgtatggtccttccttctcagctagttcacaactcgcctctaatgcaccgtaataaatggtttcgaagatcttcttatttagatcttgtgcttccaggctatcaaatggataatttaagagaataaacgcgtccgctaatccttgaacaccaataccgataggtctatgtctcttattagagatttcagcttctggaataggataataattaatatctataattttattgagatttctgacaattactttgaccacatccttcagtttgagaaaatcaaatcgcccatctattacaaacatgttcaaggcaacagatgccagattacaaacggctacctcattagcatccgcatattgtattatctcagtgcaaagattactacacttgatagttcctaaattttgttgattactctttttgttacacgcatccttataaagaatgaatggagtaccagtttcaatctgagattctataatcgctttccagacgactcgagcctttattatagatttgtatctcctttctctttcgtatagtgtatacaatcgttcgaactcgtctccccaaacattgtccaatccaggacattcatccggacacatcaacgaccactctccgtcatccttcactcgtttcataaagagatcaggaatccaaagagctataaatagatctctggttctatgttcctcgtttcctgtattctttttaagatcgaggaacgccataatatcagaatgccacggttccaagtatatggccataactccaggccgtttgtttcctccctgatctatgtatctagcggtgttattataaactctcaacattggaataataccgtttgatataccattggtaccggagatatagcttccactggcacgaatattactaattgatagacctattccccctgccattttagagattaatgcgcatcgttttaacgtgtcatagataccctctatgctatcatcgatcatgttaagtagaaaacagctagacatttggtgacgactagttcccgcattaaataaggtaggagaagcgtgcgtaaaccatttttcagaaagtagattgtacgtctcaatagctgagtctatatcccattgatgaattcctactgcgacacgcattaacatgtgctgaggtctttcaacgatcttgttgtttattttcaacaagtaggatttttccaaagttttaaaaccaaaatagttgtatgaaaagtctcgttcgtaaataataaccgagttgagtttatccttatatttgttaactatatccatggtgatacttgaaataatcggagaatgtttcccatttttaggattaacatagttgaataaatcctccatcacttcactaaatagtttttttgtttccttgtgtagatttgatacggctattctggcggctagaatggcataatccggatgttgtgtagtacaagtggctgctatttcggctgccagagtgtccaattctaccgttgttactccattatatattccttgaataaccttcatagctattttaataggatctatatgatccgtgtttaagccataacataattttctaatacgagacgtgattttatcaaacatgacattttccttgtatccatttcgtttaatgacaaacatttttgttggtgtaataaaaaaattatttaacttttcattaatagggatttgacgtatgtagcgtacaaaatgattgttcctggtatatagataaagagtcctatatatttgaaaatcgttacggctcgattaaactttaatgattgcatagtgaatatatcattaggatttaactccttgactatcatggcggcgccagaaattaccatcaaaagcattaatacagttataccgatcgcagttagaacggttatagcatccaccatttatatctaaaaattagatcaaagaatatgtgacaaagtcctagttgtatactgagaattgacgaaacaatgtttcttacatatttttttcttattagtaaccgacttaatagtaggaactggaaaactagacttgattattctataagtatagatacccttccaaataatattctctttgataaaagttccagaaaatgtagaattttttaaaaagttatcttttgctattaccaagattgtgtttagacgcttattattaatatgagtgatgaaatccacaccgcctctagatatcgcctttatttccacattagatggtaaatccaatagtgaaactatctttttaggaatgtatggactcgcgtttagaggagtaaacgtcttaggcgtcggaaaggatgattcatcaaacgaataaacaatttcacaaatggatgttaatgtattagtaggaaattttttgacgctattggaattgaagattctaatggatgatgttctacctatttcatccgataacatgttaatttccgacaccaacggttttaatatttcgatgatatacggtagtctctctttcggacttatatagcttattccacaatacgagtcattatatactccaaaaaacaaaataactagtataaaatctgtatcgaatgggaaaaacgaaattatcgacataggtatagaatccggaacattgaacgtattaatacttaattctttttctgtggtaagtaccgataggttattgacattgtatggttttaaatattctataacttgagacttgatagatattagtgatgaattgaaaattatttttatcaccacgtgtgtttcaggatcatcgtcgacgcccgtcaaccaaccgaacggagtaaaataaatatcattaatatatgctctagatattagtatttttatcaatcctttgattatcatcttctcgtaggcgaatgattccatgatcaagagtgatttaagaacatcctccggagtattaatgggcttagtaaacagtccatcgttgcaataataaaagttatccaagttaaaggatattatgcattcgtttaaagatatcacctcatctgacggagacaattttttggtaggttttagagactttgaagctacttgtttaacaaagttattcatcgtcgtctactattctatttaattttgtagttaatttatcacatatcacattaattgactttttggtccacttttccatacgtttatattcttttaatcctgcgttatccgtttccgttatatccagggatagatcttgcaagttaaatagaatgctcttaaataatgtcattttcttatccgctaaaaatttaaagaatgtataaacctttttcagagatttgaaactcttaggtggtgtcctagtacacaatatcataaacaaactaataaacattccacattcagattccaacagctgattaacttccacattaatacagcctattttcgctccaaatgtacattcgaaaaatctgaataaaacatcgatgtcacaatttgtattatccaatacagaatgtttgtgattcgtgttaaaaccatcggagaaggaatagaaataaaaattattatagtggtggaattcagttggaatattgcctccggagtcataaaaggatactaaacattgttttttatcataaattacacatttccaatgagacaaataacaaaatccaaacattacaaatctagaggtagaacttttaattttgtctttaagtatatacgataagatatgtttattcataaacgcgtcaaatttttcatgaatcgctaaggagtttaagaatctcatgtcaaattgtcctatataatccacttcggatccataagcaaactgagagactaagttcttaatacttcgattgctcatccaggctcctctctcaggctctattttcatcttgacgacctttggattttcaccagtatgtattcctttacgtgataaatcatcgattttcaaatccatttgtgagaagtctatcgccttagatactttttcccgtagtcgaggtttaaaaaaatacgctaacggtatactagtaggtaactcaaagacatcatatatagaatggtaacgcgtctttaactcgtcggttaactctttcttttgatcgagttcgtcgctactattgggtctgctcaggtgccccgactctactagttccaacatcataccgataggaatacaagacactttgccggcggttgtagatttatcatatttttccactacatatccgttacaatttgttaaaaatttagatacatctatattgctacataatccagctagtgaatatatatgacataataaattggtaaatcctagttctggtattttactaattactaaatctgtatatctttccatttatcatggaaaagaatttaccagatatcttcttttttccaaactgcgttaatgtattctcttacaaatattcacaagatgaattcagtaatatgagtaaaacggaacgtgatagtttctcattggccgtgtttccagttataaaacatagatggcataacgcacacgttgtaaaacataaaggaatatacaaagttagtacagaagcacgtggaaaaaaagtatctcctccatcactaggaaaacccgcacacataaacctaaccgcgaagcaatatatatacagtgaacacacaataagctttgaatgttatagttttctaaaatgtataacaaatacagaaatcaattcgttcgatgagtatatattaagaggactattagaagctggtaatagtttacagatattttccaattccgtaggtaaacgaacagatactataggtgtactagggaataagtatccatttagcaaaattccattggcctcattaactcctaaagcacaacgagagatattttcagcgtggatttctcatagacctgtagttttaactggaggaactggagtgggtaagacgtcacaggtacccaagttattgctttggtttaattatttatttggtggattctctactctagataaaatcactgactttcacgaaagaccagtcattctatctcttcctaggatagctttagttagattgcatagcaataccattttaaaatcattgggatttaaggtactagatggatctcctatttctttacggtacggatctataccggaagaattaataaacaaacaaccaaaaaaatatggaattgtattttctacccataagttatctctaacaaaactatttagttatggcactcttattatagacgaagttcatgagcatgatcaaataggagatattattatagcagtagcgagaaagcatcatacgaaaatagattctatgtttttaatgactgccacgttagaggatgacagggaacggctaaaagtatttttacctaatcccgcatttatacatattcctggagatacactgtttaaaattagcgaggtatttattcataataagataaatccatcttccagaatggcatacatagaagaagaaaagagaaatttagttactgctatacagatgtatactcctcctgatggatcatccggtatagtctttgtggcatccgttgcacagtgtcacgaatataaatcatatttagaaaaaagattaccgtatgatatgtatattattcatggtaaggtcttagatatagacgaaatattagaaaaagtgtattcatcacctaatgtatcgataattatttctactccttatttggaatccagcgttactatacgcaatgttacacacatttatgatatgggtagagtttttgtccccgctccttttggaggatcgcaacaatttatttctaaatctatgagagatcaacgaaaaggaagagtaggaagagttaatcctggtacatacgtctatttctatgatctgtcttatatgaagtctatacagcgaatagattcagaatttctacataattatatattgtacgctaataagtttaatctaacactccccgaagatttgtttataatccctacaaatttggatattctatggcgtacaaaggaatatatagactcgttcgatattagtacagaaacatggaataaattattatccaattattatatgaagatgatagagtatgctaaactttatgtactaagtcctattctcgctgaggagttggataactttgagaggacgggagaattaactagtattgtacgagaagccattttatctctaaatttacaaattaagattttaaattttaaacataaagatgatgatacgtatatacacttttgtaaaatattattcggtgtctataacggaacaaacgctactatatattatcatagacctctaacgggatatatgaatatgatttcagatactatatttgttcctgtagataataactaaaaatcaaactctaatgaccacatctttttttagagatgaaaaattttccacatctccttttgtagacacgactaaacattttgcagaaaaaagtttattagtgtttagataatcgtatacttcatcagtgtagatagtaaatgtgaacagataaaaggtattcttgctcaatagattggtaaattccatagaatatattaatcctttcttcttgagatcccacatcatttcaaccagagacgttttatccaatgatttacctcgtactataccacatacaaaactagattttgcagtgacgtcgtacctggtattcctaccaaacaaaattttacttttagttcttttagaaaattctaaggtagaatctctatttgccaatatgtcatctatggaattaccactagcaaaaaatgatagaaatatatattgatacatcgcagctggttttgatctactatactttaaaaacgaatcagattccataattgcctgtatatcatcagctgaaaaactatgttttacacgtattccttcggcatttctttttaatgatatatcttgtttagacaatgataaagttatcatgtccatgagagacgcgtctccgtatcgtataaatatttcattagatgttagacgcttcattaggggtatacttctataaggtttcttaatcagtccatcattggttgcgtcaagaactactatcggatgttgttgggtatctctagtgttacacatggccttactaaagtttgggtaaataactatgatatctctattaattatagatgcatatatttcattcgtcaaggatattagtatcgacttgctatcgtcattaatacgtgtaatgtaatcatataaatcatgcgatagccaaggaaaatttaaatagatgttcatcatataatcgtcgctataattcatattaatacgttgacattgactaatttgtaatatagcctcgccacgaagaaagctctcgtattcagtttcatcgataaaggataccgttaaatataactggttgccgatagtctcatagtctattaagtggtaagtttcgtacaaatacagaatccctaaaatattatctaatgttggattaatctttaccataactgtataaaatggagacggagtcataactattttaccgtttgtacttactggaatagatgaaggaataatctccggacatgctggtaaagacccaaatgtctgtttgaagaaatccaatgttccaggtcctaatctcttaacaaaaattacgatattcgatcccgatatcctttgcattctatttaccagcatatcacgaactatattaagattatctatcatgtctattctcccaccgttatataaatcgcctccgctaagaaacgttagtatatccatacaatggaatacttcatttctaaaatagtattcgttttctaattctttaatgtgaaatcgtatactagaaagggaaaaattatctttgagttttccgttagaaaagaaccacgaaactaatgttctgattgcgtccgattccgttgctgaattaatggatttacaccaaaaactcatataacttctagatgtagaagcattcgctaaaaaattagtagaatcaaaggatataagtagatgttccaacaagtgagcaattcccaagatttcatctatatcattctcgaatccgaaattagaaattcccaagtagatatcctttttcatccgatcgttgatgaaaatacgaactttattcggtaagacaatcatttactaaggagtaaaataggaagtaatgttcgtatgtcgttatcatcgtataaattaaaggtgtgttttttaccattaagtgacattataattttaccaatattggaattataatataggtgtatttgcgcactcgcgacggttgatgcatcggtaaatatagctgtatctaatgttctagtcggtatttcatcatttcgctgtctaataatagcgttttctctatctgtttccattacagctgcctgaagtttattggtcggataatatgtaaaataataagaaatacatacgaataacaaaaataaaataagatataataaagatgccatttagagatctaattttgtttaacttgtccaaattcctacttacagaagatgaggaatcgttggagatagtgtcttccttatgtagaggatttgaaatatcttataatgacttgataacttactttccagataggaaataccataaatatatttataaagtatttgaacatgtagatttatcggaggaattaagtatggaattccatgatacaactctgagagatttagtctatcttagattgtacaagtattccaagtgtatacggccgtgttataaattaggagataatctaaaaggcatagttgttataaaggacaggaatatttatattagggaagcaaatgatgacttgatagaatatctcctcaaggaatacactcctcagatttatacatattctaatgagcgcgtccccataactggttcaaaattaattctttgtggattttctcaagttacatttatggcgtatacaacgtcgcatataacaacaaataaaaaggtagatgttctcgtttccaaaaaatgtatagatgaactagtcgatccaataaattatcaaatacttcaaaatttatttgataaaggaagcggaacaataaacaaaatactcaggaagatattttattcggtaacaggtggccaaactccataggtagctttttctatttcggattttagaatttccaaattcaccagcgatttatcggttttggtgaaatccaaggatttattaatgtccacaaatgccatttgttttgtctgtggattgtatttgaaaatggaaacgatgtagttagatagatgcgctgcgaagtttcctattagggttccgcgcttcacgtcacccagcatacttgaatcaccatcctttaaaaaaaatgataagatatcaacatggagtatatcatactcgaattttaattcttctactgactcactgacattttcacaaatactacaatacggtttaccgaaaataatcagtacgttcttcatttatgggtatcaaaaacttaaaatcgttactgctggaaaataaatcactgacgatattagatgataatttatacaaagtatacaatggaatatttgtggatacaatgagtatttatatagccgtcgccaattgtgtcagaaacttagaagagttaactacggtattcataaaatacgtaaacggatgggtaaaaaagggagggcatgtaaccctttttatcgatagaggaagtataaaaattaaacaagacgttagagacaagagacgtaaatattctaaattaaccaaggacagaaaaatgttagaattagaaaagtgtacatccgaaatacaaaatgttaccggatttatggaagaagaaataaaggcagaaatgcaattaaaaatcgataaactcacatttcaaatatatttatctgattctgataacataaaaatatcattgaatgagatactaacacatttcaacaataatgagaatgttacattattttattgtgatgaacgagacgcagaattcgttatgtgtctcgaggctaaaacacatttctctaccacaggagaatggccgttgataataagtaccgatcaggatactatgctatttgcatctgctgataatcatcctaagatgataaaaaacttaactcaactgtttaaatttgttccctcggcagaggataactatttagcaaaattaacggcgttagtgaatggatgtgatttctttcctggactctatggggcatctataacacccaccaacttaaacaaaatacaattgtttagtgattttacaatcgataatatagtcactagtttggcaattaaaaattattatagaaagactaactctaccgtagacgtgcgtaatattgttacgtttataaacgattacgctaatttagacgatgtctactcgtatattcctccttgtcaatgcactgttcaagaatttatattttccgcattagatgaaaaatggaatgaatttaaatcatcttatttagaaagcgtgccgttaccctgccaattaatgtacgcgttagaaccacgcaaggagattgatgtttcagaagttaaaactttatcatcttatatagatttcgaaaatactaaatcagatatcgatgttataaaatctatatcctcgatcttcggatattctaacgaaaactgtaacacgatagtattcggcatctataaggataatttactactgagtataaataattcattttactttaacgatagtctgttaataaccaatactaaaagtgataatataataaatataggttactagattaaaaatggtgttccaactcgtgtgctctacatgcggtaaagatatttctcacgaacgatataaattgattatacgaaaaaaatcattaaaggatgtactcgtcagtgtaaagaacgaatgttgtaggttaaaattatctacacaaatagaacctcaacgtaacttaacagtgcaacctctattggatataaactaatatggatccggttaattttatcaagacatatgcgcctagaggttctattatttttattaattataccatgtcattaacaagtcatttgaatccatcgatagaaaaacatgtgggtatttattatggtacgttattatcggaacacttggtagttgaatctacctatagaaaaggagttcgaatagtcccattggatagtttttttgaaggatatcttagtgcaaaagtatacatgttagagaatattcaagttatgaaaatagcagctgatacgtcattaactttattgggtattccgtatggatttggtcatgatagaatgtattgttttaaattggtagctgactgttataaaaatgccggtattgatacatcgtctaaacgaatattgggcaaagatatttttctgagccaaaacttcacagacgataatagatggataaagatatatgattctaataatttaacattttggcaaattgattaccttaaagggtgagttaatatgcataactactcctccgttgttttttccctcgttctttttcttaacgttgtttgccatcactctcataatgtaaagatattctaaaatggtaaacttttgcatatcggacgcagaaattggtataaatgttgtaattgtattatttcccgtcaatggactagtcacagctccatcagttttatatcctttagagtatttctcactcgtgtctaacattctagagcattccatgatctgtttatcgttgatattggccggaaagatagattttttattttttattatattactattggcaattgtagatataacttctggtaaatatttttctaccttttcaatctcttctattttcaagccggctatatattctgctatattgttgctagtatcaataccttttctggctaagaagtcatatgtggtattcactatatcagttttaactggtagttccattagcctttccacttctgcagaataatcagaaattggttctttaccagaaaatccagctactataataggctcaccgatgatcattggcaaaatcctatattgtaccagattaatgagagcatatttcatttccaataattctgctagttcttgagacattgatttatttgatgaatctagttggttctctagatactctaccatttctgccgcatacaataacttgttagataaaatcagggttatcaaagtgtttagcgtggctagaatagtgggcttgcatgtattaaagaatgcggtagtatgagtaaaccgttttaacgaattatatagtctccagaaatctgtggcgttacatacatgagccgaatgacatcgaagattgtccaatatttttaatagctgctctttgtccattatttctatatttgactcgcaacaattgtagataccattaatcaccgattcctttttcgatgccggacaatagcacaattgtttagctttggactctatgtattcagaattaatagatatatctctcaatacagattgcactatacattttgaaactatgtcaaaaattgtagaacgacgctgttctgcagccatttaactttaaataatttacaaaaatttaaaatgagcatccgtataaaaatcgataaactgcgccaaattgtggcatatttttcagagttcagtgaagaagtgtctataaatgtagactcgacggatgagttaatgtatatttttgccgccttgggcggatctgtaaacatttgggcaattatacctctaagtgcatcagtgttttaccgaggagccgaaaatattgtgtttaatcttcctgtgtccaaggtaaaatcgtgtttgtgtagttttcacaatgatgccatcatagatatagaacctgatctggaaaataatctagtaaaactttctagttatcatgtagtaagtgtcgattgtaacaaggaactgatgcctattaggacagatactactatttgtctaagtatagatcaaaagaaatcttacgtgtttaattttcacaagtatgaagaaaaatgttgtggtagaaccgtcattcatctagaatggttgttgggctttatcaagtgtattagtcagcatcagcatctggctattatgtttaaagatgacaatattattatgaagactcctggtaatactgatgcgttttccagggaatattctatgactgaatgttctcaagaactacaaaagttttctttcaaaatagctatctcgtctctcaacaaactacgaggattcaaaaagagagtcaatgtttttgaaactagaatcgtaatggataatgacgataacattttaggaatgttgttttcggatagagttcaatcctttaagatcaacatctttatggcgtttttagattaatactttcaatgagataaatatgggtggcggagtaagtgttgagctccctaaacgggatccgcctccgggagtacccactgatgagatgttattaaacgtggataaaatgcatgacgtgatagctcccgctaagcttttagaatatgtgcatataggaccactagcaaaagataaagaggataaagtaaagaaaagatatccagagtttagattagtcaacacaggacccggtggtctttcggcattgttaagacaatcgtataatggaaccgcacccaattgctgtcgcacttttaatcgtactcattattggaagaaggatggaaagatatcagataagtatgaagagggtgcagtattagaatcgtgttggccagacgttcacgacactggaaaatgcgatgttgatttattcgactggtgtcagggggatacgttcgatagaaacatatgccatcagtggatcggttcagcctttaataggagtaatagaactgtagagggtcaacaatcgttaataaatctgtataataagatgcaaacattatgtagtaaagatgctagtgtaccaatatgcgaatcatttttgcattatttacgcgcacacaatacagaagatagcaaagagatgatcgattatattctaagacaacagtctgcggactttaaacagaaatatatgagatgtagttatcccactagagataagttagaagagtcattaaaatatgcggaacctcgagaatgttgggatccagagtgttcgaatgccaatgttaatttcttactaacacgtaattataataatttaggactttgcaatattgtacgatgtaataccagcgtgaacaacttacagatggataaaacttcctcattaagattgtcatgtggattaagcaatagtgatagattttctactgttcccgtcaatagagcaaaagtagttcaacataatattaaacactcgttcgacctaaaattgcatttgatcagtttattatctctcttggtaatatggatactaattgtagctatttaaatgggtgccgcggcaagcatacagacgacggtgaatacactcagcgaacgtatctcgtctaaattagaacaagaagcgaacgctagtgctcaaacaaaatgtgatatagaaatcggaaatttttatatccgacaaaaccatggatgtaacctcactgttaaaaatatgtgctctgcggacgcggatgctcagttggatgctgtgttatcagccgctacagaaacatatagtggattaacaccggaacaaaaagcatacgtgccagctatgtttactgctgcgttaaacattcagacgagtgtaaacactgttgttagagattttgaaaattatgtgaaacagacttgtaattctagcgcggtcgtcgataacaaattaaagatacaaaacgtaatcatagatgaatgttacggagccccaggatctccaacaaatttggaatttattaatacaggatctagcaaaggaaattgtgccattaaagcgttgatgcaattgacgactaaggccactactcaaatagcacctagacaagttgctggtacaggagttcagttttatatgattgttatcggtgttataatattggcagcgttgtttatgtactatgccaagcgtatgttgttcacatccaccaatgataaaatcaaacttattttagccaataaggaaaacgtccattggactacttacatggacacattctttagaacttctccgatggttattgctaccacggatatgcaaaactgaaaatatattgataatattttaatagattaacatggaagttatcgctgatcgtctagacgatatagtgaaacaaaatatagcggatgaaaaatttgtagattttgttatacacggtctagagcatcaatgtcctgctatacttcgaccattaattaggttgtttattgatatactattatttgttatagtaatttatatttttacggtacgtctagtaagtagaaattatcaaatgttgttggtggtgctagtcatcacattaactattttttattactttatactataatagtactagactgacttctaacaaacatctcacctgccataaataaatgcttgatattaaagtcttctatttctaacactattccatctgtggaaaataatactctgacattatcgctaattgacacatcggtgagtgatatgcctataaagtaataatcttctttgggcacatataccagtgtaccaggttctaacaacctatttactggtgctcctgtagcatactttttctttaccttgagaatatccatcgtttgcttggtcaatagcgatatgtgattttttatcaaccactcaaaaaagtaattggagtgttcatatcctctacgggctattgtctcatggccgtgtatgaaatttaagtaacacgactgtggtagatttgttctatagagccgattgccgcaaatagatagaactaccaatatgtctgtacaaatgttaaacattaattgattaacagaaaaaacaatgttcgttctgggaatagaaaccagatcaaaacaaaattcgttagaatatatgccacgtttatacatggaatataaaataactacagtttgaaaaataacagtatcatttaaacatttaacttgcggggttaatctcacaactttactgtttttgaactgttcaaaatatagcatcgatccgtgagaaatacgtttagccgcctttaatagaggaaatcccaccgcctttctggatctcaccaacgacgatagttctgaccagcaactcatttcttcatcatccacctgttttaacatataataggcaggagatagatatccgtcattgcaatattccttctcgtaggcacacaatctaatattgataaaatctccattctcttctctgcatttattatcttgtctcggtggctgattaggctgtggtcttggtttaggccttggtctatcgttgttgaatctattttggtcattaaatctttcatttcttcctggtatatttctatcacctcgtttggttggatttttgtctatattatcgtttgtaacatcggtacgggtattcatttatcacaaaaaaaacttctctaaatgagtctactgctagaaaacctcatcgaagaagataccatattttttgcaggaagtatatctgagtatgatgatttacaaatggttattgccggcgcaaaatccaaatttccaagatctatgctttctatttttaatatagtacctagaacgatgtcaaaatatgagttggagttgattcataacgaaaatatcacaggagcaatgtttaccacaatgtataatataagaaacaatttgggtctaggagatgataaactaactattgaagccattgaaaactatttcttggatcctaacaatgaagttatgcctcttattattaataatacggatatgactgccgtcattcctaaaaaaagtggtaggagaaagaataagaacatggttatcttccgtcaaggatcatcacctatcttgtgcattttcgaaactcgtaaaaagattaatatttataaagaaaatatggaatccgcgtcgactgagtatacacctatcggagacaacaaggctttgatatctaaatatgcgggaattaatgtcctgaatgtgtattctccttccacatccataagattgaatgccatttacggattcaccaataaaaataaactagagaaacttagtactaataaggaactagaatcgtatagttctagccctcttcaagaacccattaggttaaatgattttctgggactattggaatgtgttaaaaagaatattcctctaacagatattccgacaaaggattgattactataaatggagaatgttcctaatgtatactttaatcctgtgtttatagagcccacgtttaaacattctttattaagtgtttataaacacagattaatagttttatttgaagtattcgttgtattcattctaatatatgtattttttagatctgaattaaatatgttcttcatgcctaaacgaaaaatacccgatcctattgatagattacgacgtgctaatctagcgtgtgaagacgataaattaatgatctatggattaccatggatgacaactcaaacatctgcgttatcaataaatagtaaaccgatagtgtataaagattgtgcaaagcttttgcgatcaataaatggatcacaaccagtatctcttaacgatgttcttcgcagatgatgattcattttttaagtatttggctagtcaagatgatgaatcttcattatctgatatattgcaaatcactcaatatctagactttctgttattattattgatccaatcaaaaaataaattagaagctgtgggtcattgttatgaatctctttcagaggaatacagacaattgacaaaattcacagactttcaagattttaaaaaactgtttaacaaggtccctattgttacagatggaagggtcaaacttaataaaggatatttgttcgactttgtgattagtttgatgcgattcaaaaaagaatcctctctagctaccaccgcaatagatcctgttagatacatagatcctcgtcgcaatatcgcattttctaacgtgatggatatattaaagtcgaataaagtgaacaataattaattctttattgtcatcatgaacggcggacatattcagttgataatcggccccatgttttcaggtaaaagtacagaattaattagacgagttagacgttatcaaatagctcaatataaatgcgtgactataaaatattctaacgataatagatacggaacgggactatggacgcatgataagaataattttgaagcattggaagcaactaaactatgtgatgtcttggaatcaattacagatttctccgtgataggtatcgatgaaggacagttctttccagacattgttgaattagatcgataaaaattaattaattacccgggtaccaggcctagatctgtcgagatccggtggtggtgcaaatcaaagaactgctcctcagtggatgttgcctttacttctaggcctgtacggaagtgttacttctgctctaaaagctgctgcagggggggggggggggtgggggggccggttagggccgccatcccctcagagcgtcgggatatcgggtggcggctcgggacggaggacgcgctagtgttcttctgtgtggcagttcagaatgatggatcaagctagatcagcattctctaacttgtttggtggagaaccattgtcatatacccggttcagcctggctcggcaagtagatggcgataacagtcatgtggagatgaaacttgctgtagatgaagaagaaaatgctgacaataacacaaaggccaatgtcacaaaaccaaaaaggtgtagtggaagtatctgctatgggactattgctgtgatcgtctttttcttgattggatttatgattggctacttgggctattgtaaaggggtagaaccaaaaactgagtgtgagagactggcaggaaccgagtctccagtgagggaggagccaggagaggacttccctgcagcacgtcgcttatattgggatgacctgaagagaaagttgtcggagaaactggacagcacagacttcaccagcaccatcaagctgctgaatgaaaattcatatgtccctcgtgaggctggatctcaaaaagatgaaaatcttgcgttgtatgttgaaaatcaatttcgtgaatttaaactcagcaaagtctggcgtgatcaacattttgttaagattcaggtcaaagacagcgctcaaaactcggtgatcatagttgataagaacggtagacttgtttacctggtggagaatcctgggggttatgtggcgtatagtaaggctgcaacagttactggtaaactggtccatgctaattttggtactaaaaaagattttgaggatttatacactcctgtgaatggatctatagtgattgtcagagcagggaaaatcacctttgcagaaaaggttgcaaatgctgaaagcttaaatgcaattggtgtgttgatatacatggaccagactaaatttcccattgttaacgcagaactttcattctttggacatgctcatctggggacaggtgacccttacacacctggattcccttccttcaatcacactcagtttccaccatctcggtcatcaggattgcctaatatacctgtccagacaatctccagagctgctgcagaaaagctgtttgggaatatggaaggagactgtccctctgactggaaaacagactctacatgtaggatggtaacctcagaaagcaagaatgtgaagctcactgtgagcaatgtgctgaaagagataaaaattcttaacatctttggagttattaaaggctttgtagaaccagatcactatgttgtagttggggcccagagagatgcatggggccctggagctgcaaaatccggtgtaggcacagctctcctattgaaacttgcccagatgttctcagatatggtcttaaaagatgggtttcagcccagcagaagcattatctttgccagttggagtgctggagactttggatcggttggtgccactgaatggctagagggatacctttcgtccctgcatttaaaggctttcacttatattaatctggataaagcggttcttggtaccagcaacttcaaggtttctgccagcccactgttgtatacgcttattgagaaaacaatgcaaaatgtgaagcatccggttactgggcaatttctatatcaggacagcaactgggccagcaaagttgagaaactcactttagacaatgctgctttccctttccttgcatattctggaatcccagcagtttctttctgtttttgcgaggacacagattatccttatttgggtaccaccatggacacctataaggaactgattgagaggattcctgagttgaacaaagtggcacgagcagctgcagaggtcgctggtcagttcgtgattaaactaacccatgatgttgaattgaacctggactatgagaggtacaacagccaactgctttcatttgtgagggatctgaaccaatacagagcagacataaaggaaatgggcctgagtttacagtggctgtattctgctcgtggagacttcttccgtgctacttccagactaacaacagatttcgggaatgctgagaaaacagacagatttgtcatgaagaaactcaatgatcgtgtcatgagagtggagtatcacttcctctctccctacgtatctccaaaagagtctcctttccgacatgtcttctggggctccggctctcacacgctgccagctttactggagaacttgaaactgcgtaaacaaaataacggtgcttttaatgaaacgctgttcagaaaccagttggctctagctacttggactattcagggagctgcaaatgccctctctggtgacgtttgggacattgacaatgagttttaaatgtgatacccatagcttccatgagaacagcagggtagtctggtttctagacttgtgctgatcgtgctaaattttcagtagggctacaaaacctgatgttaaaattccatcccatcatcttggtactactagatgtctttaggcagcagcttttaatacagggtagataacctgtacttcaagttaaagtgaataaccacttaaaaaatgtccatgatggaatattcccctatctctagaattttaagtgctttgtaatgggaactgcctctttcctgttgttgttaatgaaaatgtcagaaaccagttatgtgaatgatctctctgaatcctaagggctggtctctgctgaaggttgtaagtggtcgcttactttgagtgatcctccaacttcatttgatgctaaataggagataccaggttgaaagaccttctccaaatgagatctaagcctttccataaggaatgtagctggtttcctcattcctgaaagaaacagttaactttcagaagagatgggcttgttttcttgccaatgaggtctgaaatggaggtccttctgctggataaaatgaggttcaactgttgattgcaggaataaggccttaatatgttaacctcagtgtcatttatgaaaagaggggaccagaagccaaagacttagtatattttcttttcctctgtcccttcccccataagcctccatttagttctttgttatttttgtttcttccaaagcacattgaaagagaaccagtttcaggtgtttagttgcagactcagtttgtcagactttaaagaataatatgctgccaaattttggccaaagtgttaatcttaggggagagctttctgtccttttggcactgagatatttattgtttatttatcagtgacagagttcactataaatggtgtttttttaatagaatataattatcggaagcagtgccttccataattatgacagttatactgtcggttttttttaaataaaagcagcatctgctaataaaacccaacagatactggaagttttgcatttatggtcaacacttaagggttttagaaaacagccgtcagccaaatgtaattgaataaagttgaagctaagatttagagatgaattaaatttaattaggggttgctaagaagcgagcactgaccagataagaatgctggttttcctaaatgcagtgaattgtgaccaagttataaatcaatgtcacttaaaggctgtggtagtactcctgcaaaattttatagctcagtttatccaaggtgtaactctaattcccattttgcaaaatttccagtacctttgtcacaatcctaacacattatcgggagcagtatcttccataatgtataaagaacaaggtagtttttacctaccacagtgtctgtatcggagacagtgatctccatatgttacactaagggtgtaagtaattatcgggaacagtgtttcccataattttcttcatgcaatgacatcttcaaagcttgaagatcgttagtatctaacatgtatcccaactcctataattccctatcttttagttttagttgcagaaacattttgtggtcattaagcattgggtgggtaaattcaaccactgtaaaatgaaattactacaaaatttgaaatttagcttgggtttttgttacctttatggtttctccaggtcctctacttaatgagatagtagcatacatttataatgtttgctattgacaagtcattttaactttatcacattatttgcatgttacctcctataaacttagtgcggacaagttttaatccagaattgaccttttgacttaaagcagagggactttgtatagaaggtttgggggctgtggggaaggagagtcccctgaaggtctgacacgtctgcctacccattcgtggtgatcaattaaatgtaggtatgaataagttcgaagctccgtgagtgaaccatcattataaacgtgatgatcagctgtttgtcatagggcagttggaaacggcctcctagggaaaagttcatagggtctcttcaggttcttagtgtcacttacctagatttacagcctcacttgaatgtgtcactactcacagtctctttaatcttcagttttatctttaatctcctcttttatcttggactgacatttagcgtagctaagtgaaaaggtcatagctgagattcctggttcgggtgttacgcacacgtacttaaatgaaagcatgtggcatgttcatcgtataacacaatatgaatacagggcatgcattttgcagcagtgagtctcttcagaaaacccttttctacagttagggttgagttacttcctatcaagccagtacgtgctaacaggctcaatattcctgaatgaaatatcagactagtgacaagctcctggtcttgagatgtcttctcgttaaggagatgggccttttggaggtaaaggataaaatgaatgagttctgtcatgattcactattctagaacttgcatgacctttactgtgttagctctttgaatgttcttgaaattttagactttctttgtaaacaaatgatatgtccttatcattgtataaaagctgttatgtgcaacagtgtggagattccttgtctgatttaataaaatacttaaacactgaaaaaaaaaaaaaaaaaaaaaaaaaaaaaaaaaaaaaaaaaaaaaaaaaaaaaaaaaaaaaaaaaaaaaaaaaaaaaaaaagtaccttctgaggcggaaagaaccagccggatctcgacttcgagcttatttatattccaaaaaaaaaaaataaaatttcaatttttaagctttcactaattccaaacccacccgctttttatagtaagtttttcacccataaataataaatacaataattaatttctcgtaaaagtagaaaatatattctaatttattgcacggtaaggaagtagatcataactcgagcatgggagatcccgtcgttttacaacgtcgtgactgggaaaaccctggcgttacccaacttaatcgccttgcagcacatccccctttcgccagctggcgtaatagcgaagaggcccgcaccgatcgcccttcccaacagttgcgcagcctgaatggcgaatggcgctttgcctggtttccggcaccagaagcggtgccggaaagctggctggagtgcgatcttcctgaggccgatactgtcgtcgtcccctcaaactggcagatgcacggttacgatgcgcccatctacaccaacgtgacctatcccattacggtcaatccgccgtttgttcccacggagaatccgacgggttgttactcgctcacatttaatgttgatgaaagctggctacaggaaggccagacgcgaattatttttgatggcgttaactcggcgtttcatctgtggtgcaacgggcgctgggtcggttacggccaggacagtcgtttgccgtctgaatttgacctgagcgcatttttacgcgccggagaaaaccgcctcgcggtgatggtgctgcgctggagtgacggcagttatctggaagatcaggatatgtggcggatgagcggcattttccgtgacgtctcgttgctgcataaaccgactacacaaatcagcgatttccatgttgccactcgctttaatgatgatttcagccgcgctgtactggaggctgaagttcagatgtgcggcgagttgcgtgactacctacgggtaacagtttctttatggcagggtgaaacgcaggtcgccagcggcaccgcgcctttcggcggtgaaattatcgatgagcgtggtggttatgccgatcgcgtcacactacgtctgaacgtcgaaaacccgaaactgtggagcgccgaaatcccgaatctctatcgtgcggtggttgaactgcacaccgccgacggcacgctgattgaagcagaagcctgcgatgtcggtttccgcgaggtgcggattgaaaatggtctgctgctgctgaacggcaagccgttgctgattcgaggcgttaaccgtcacgagcatcatcctctgcatggtcaggtcatggatgagcagacgatggtgcaggatatcctgctgatgaagcagaacaactttaacgccgtgcgctgttcgcattatccgaaccatccgctgtggtacacgctgtgcgaccgctacggcctgtatgtggtggatgaagccaatattgaaacccacggcatggtgccaatgaatcgtctgaccgatgatccgcgctggctaccggcgatgagcgaacgcgtaacgcgaatggtgcagcgcgatcgtaatcacccgagtgtgatcatctggtcgctggggaatgaatcaggccacggcgctaatcacgacgcgctgtatcgctggatcaaatctgtcgatccttcccgcccggtgcagtatgaaggcggcggagccgacaccacggccaccgatattatttgcccgatgtacgcgcgcgtggatgaagaccagcccttcccggctgtgccgaaatggtccatcaaaaaatggctttcgctacctggagagacgcgcccgctgatcctttgcgaatacgcccacgcgatgggtaacagtcttggcggtttcgctaaatactggcaggcgtttcgtcagtatccccgtttacagggcggcttcgtctgggactgggtggatcagtcgctgattaaatatgatgaaaacggcaacccgtggtcggcttacggcggtgattttggcgatacgccgaacgatcgccagttctgtatgaacggtctggtctttgccgaccgcacgccgcatccagcgctgacggaagcaaaacaccagcagcagtttttccagttccgtttatccgggcaaaccatcgaagtgaccagcgaatacctgttccgtcatagcgataacgagctcctgcactggatggtggcgctggatggtaagccgctggcaagcggtgaagtgcctctggatgtcgctccacaaggtaaacagttgattgaactgcctgaactaccgcagccggagagcgccgggcaactctggctcacagtacgcgtagtgcaaccgaacgcgaccgcatggtcagaagccgggcacatcagcgcctggcagcagtggcgtctggcggaaaacctcagtgtgacgctccccgccgcgtcccacgccatcccgcatctgaccaccagcgaaatggatttttgcatcgagctgggtaataagcgttggcaatttaaccgccagtcaggctttctttcacagatgtggattggcgataaaaaacaactgctgacgccgctgcgcgatcagttcacccgtgcaccgctggataacgacattggcgtaagtgaagcgacccgcattgaccctaacgcctgggtcgaacgctggaaggcggcgggccattaccaggccgaagcagcgttgttgcagtgcacggcagatacacttgctgatgcggtgctgattacgaccgctcacgcgtggcagcatcaggggaaaaccttatttatcagccggaaaacctaccggattgatggtagtggtcaaatggcgattaccgttgatgttgaagtggcgagcgatacaccgcatccggcgcggattggcctgaactgccagctggcgcaggtagcagagcgggtaaactggctcggattagggccgcaagaaaactatcccgaccgccttactgccgcctgttttgaccgctgggatctgccattgtcagacatgtataccccgtacgtcttcccgagcgaaaacggtctgcgctgcgggacgcgcgaattgaattatggcccacaccagtggcgcggcgacttccagttcaacatcagccgctacagtcaacagcaactgatggaaaccagccatcgccatctgctgcacgcggaagaaggcacatggctgaatatcgacggtttccatatggggattggtggcgacgactcctggagcccgtcagtatcggcggaattccagctgagcgccggtcgctaccattaccagttggtctggtgtcaaaaataataataaccgggcaggggggatccaattctgtgagcgtatggcaaacgaaggaaaaatagttatagtagccgcactcgatgggacatttcaacgtaaaccgtttaataatattttgaatcttattccattatctgaaatggtggtaaaactaactgctgtgtgtatgaaatgctttaaggaggcttccttttctaaacgattgggtgaggaaaccgagatagaaataataggaggtaatgatatgtatcaatcggtgtgtagaaagtgttacatcgactcataatattatattttttatctaaaaaactaaaaataaacattgattaaattttaatataatacttaaaaatggatgttgtgtcgttagataaaccgtttatgtattttgaggaaattgataatgagttagattacgaaccagaaagtgcaaatgaggtcgcaaaaaaactgccgtatcaaggacagttaaaactattactaggagaattattttttcttagtaagttacagcgacacggtatattagatggtgccaccgtagtgtatataggatctgctcccggtacacatatacgttatttgagagatcatttctataatttaggagtgatcatcaaatggatgctaattgacggccgccatcatgatcctattttaaatggattgcgtgatgtgactctagtgactcggttcgttgatgaggaatatctacgatccatcaaaaaacaactgcatccttctaagattattttaatttctgatgtgagatccaaacgaggaggaaatgaacctagtacggcggatttactaagtaattacgctctacaaaatgtcatgattagtattttaaaccccgtggcgtctagtcttaaatggagatgcccgtttccagatcaatggatcaaggacttttatatcccacacggtaataaaatgttacaaccttttgctccttcatattcagctgaaatgagattattaagtatttataccggtgagaacatgagactgactcgagttaccaaattagacgctgtaaattatgaaaaaaagatgtactaccttaataagatcgtccgtaacaaagtagttgttaactttgattatcctaatcaggaatatgactattttcacatgtactttatgctgaggaccgtgtactgcaataaaacatttcctactactaaagcaaaggtactatttctacaacaatctatatttcgtttcttaaatattccaacaacatcaactgaaaaagttagtcatgaaccaatacaacgtaaaatatctagcaaaaattctatgtctaaaaacagaaatagcaagagatccgtacgcggtaataaatagaaacgtactactgagatatactaccgatatagagtataatgatttagttactttaataaccgttagacataaaattgattctatgaaaactgtgtttcaggtatttaacgaatcatccataaattatactccggttgatgatgattatggagaaccaatcattataacatcgtatcttcaaaaaggtcataacaagtttcctgtaaattttctatacatagatgtggtaatatctgacttatttcctagctttgttagactagatactacagaaactaatatagttaatagtgtactacaaacaggcgatggtaaaaagactcttcgtcttcccaaaatgttagagacggaaatagttgtcaagattctctatcgccctaatataccattaaaaattgttagatttttccgcaataacatggtaactggagtagagatagccgatagatctgttatttcagtcgctgattaatcaattagtagagatgagataagaacattataataatcaataatatatcttatatcttatatcttatatcttatatcttgtttagaaaaatgctaatattaaaatagctaacgctagtaatccaatcggaagccatttgatatctataatagggtatctaatttcctgatttaaatagcggacagctatattctcggtagctactcgtttggaatcacaaacattatttacatctaatttactatctgtaatggaaacgtttcccaatgaaatggtacaatccgatacattgcattttgttatatttttttttaaagaggctggtaacaacgcatcgcttcgtttacatggctcgtaccaacaataatagggtaatcttgtatctattcctatccgtactatgcttttatcaggataaatacatttacatcgtatatcgtctttgttagcatcacagaatgcataaatttgttcgtccgtcatgataaaaatttaaagtgtaaatataactattatttttatagttgtaataaaaagggaaatttgattgtatactttcggttctttaaaagaaactgacttgataaaaatggctgtaatctctaaggttacgtatagtctatatgatcaaaaagagattaatgctacagatattatcattagtcatgttaaaaatgacgacgatatcggtaccgttaaagatggtagactaggtgctatggatggggcattatgtaagacttgtgggaaaacggaattggaatgtttcggtcactggggtaaagtaagtatttataaaactcatatagttaagcctgaatttatttcagaaattattcgtttactgaatcatatatgtattcactgcggattattgcgttcacgagaaccgtattccgacgatattaacctaaaagagttatcgggacacgctcttaggagattaaaggataaaatattatccaagaaaaagtcatgttggaacagtgaatgtatgcaaccgtatcaaaaaattactttttcaaagaaaaaggtttgtttcgtcaacaagttggatgatattaacgttcctaattctctcatctatcaaaagttaatttctattcatgaaaagttttggccattattagaaattcatcaatatccagctaacttattttatacagactactttcccatccctccgttgattattagaccggctattagtttttggatagatagtatacccaaagagaccaatgaattaacttacttattaggtatgatcgttaagaattgtaacttgaatgctgatgaacaggttatccagaaggcggtaatagaatacgatgatattaaaattatttctaataacactaccagtatcaatttatcatatattacatccggcaaaaataatatgattagaagttatatcgtcgcccgacgaaaagatcagaccgctagatctgtaattggtcccagtacatctatcaccgttaatgaggtaggaatgcccgcatatattagaaatacacttacagaaaagatatttgttaatgcctttacagtggataaagttaaacaactattagcgtcaaaccaagttaaattttactttaataaacgattaaaccaattaacaagaatacgccaaggaaagtttattaaaaataaaatacatttattgcctggtgattgggtagaagtagctgttcaagaatatacaagtattatttttggaagacagccgtctctacatagatacaacgtcatcgcttcatctatcagagctaccgaaggagatactatcaaaatatctcccggaattgccaactctcaaaatgctgatttcgacggggatgaggaatggatgatattagaacaaaatcctaaagctgtaattgaacaaagtattcttatgtatccgacgacgttactcaaacacgatattcatggagcccccgtttatggatctattcaagatgaaatcgtagcagcgtattcattgtttaggatacaagatctttgtttagatgaagtattgaacatcttggggaaatatggaagagagttcgatcctaaaggtaaatgtaaattcagcggtaaagatatctatacttacttgataggtgaaaagattaattatccgggtctcttaaaggatggtgaaattattgcaaacgacgtagatagtaattttgttgtggctatgaggcatctgtcattggctggactcttatccgatcataagtcgaacgtggaaggtatcaactttattatcaagtcatcttatgtttttaagagatatctatctatttacggttttggggtgacattcaaagatctgagaccaaattcgacgttcactaataaattggaggccatcaacgtagaaaaaatagaacttatcaaagaagcatacgccaaatatctcaacgatgtaagagacgggaaaatagttccattatctaaagctttagaggcggactatgtggaatccatgttatccaacttgacaaatcttaatatccgagagatagaagaacatatgagacaaacgctgatagatgatccagataataacctcctgaaaatggccaaagcgggttataaagtaaatcccacagaactaatgtatattctaggtacgtatggacaacaaaggattgatggtgaaccagcagagactcgagtattgggtagagttttaccttactatcttccagactctaaggatccagaaggaagaggttacattcttaattctttaacaaaaggattaacgggttctcaatattacttttcgatgctggttgccagatctcaatctactgatatcgtctgtgaaacatcacgtaccggaacactggctagaaaaatcattaaaaagatggaggatatggtggtcgacggatacggacaagtagttataggtaatacgctcatcaagtacgccgccaattataccaaaattctaggctcagtatgtaaacctgtagatcttatctatccagatgagtccatgacttggtatttggaaattagtgctctgtggaataaaataaaacagggattcgtttactctcagaaacagaaacttgcaaagaagacattggcgccgtttaatttcctagtattcgtcaaacccaccactgaggataatgctattaaggttaaggatctgtacgatatgattcataacgtcattgatgatgtgagagagaaatacttctttacggtatctaatatagattttatggagtatatattcttgacgcatcttaatccttctagaattagaattacaaaagaaacggctatcactatctttgaaaagttctatgaaaaactcaattatactctaggtggtggaactcctattggaattatttctgcacaggtattgtctgagaagtttacacaacaagccctgtccagttttcacactactgaaaaaagtggtgccgtcaaacaaaaacttggtttcaacgagtttaataacttgactaatttgagtaagaataagaccgaaattatcactctggtatccgatgatatctctaaacttcaatctgttaagattaatttcgaatttgtatgtttgggagaattaaatccaaacatcactcttcgaaaagaaacagataaatatgtagtagatataatagtcaatagattatacatcaagagagcagaaataaccgaattagtcgtcgaatatatgattgaacgatttatctcctttagcgtcattgtaaaggaatggggtatggagacattcattgaggacgaggataatattagatttactgtctacctaaatttcgttgaaccggaagaattgaatcttagtaagtttatgatggttcttccgggggcagccaacaagggaaagattagtaaattcaagattcctatctctgattatacgggatatgacgacttcaatcaaacaaaaaagctcaataagatgactgtagaactcatgaatctaaaagaattgggttctttcgatttggaaaacgtcaacgtgtatcctggagtatggaatacatacgatatcttcggtatcgaggccgctcgtgaatacttgtgcgaagccatgttaaacacctatggagaagggttcgattatctgtatcagccttgtgatcttctcgctagtttactatgtgctagttacgaaccagaatcagtgaataaattcaagttcggcgcagctagtactcttaagagagctacgttcggagacaataaagcattgttaaacgcggctcttcataaaaagtcagaacctattaacgataatagtagctgccacttttttagcaaggtccctaatataggaactggatattacaaatactttatcgacttgggtcttctcatgagaatggaaaggaaactatctgataagatatcttctcaaaagatcaaggaaatggaagaaacagaagacttttaattcttatcaataacatatttttctatgatctgtcttttaaacgatggattttccacaaatgcgcctctcaagtccctcatagaatgatacacgtataaaaaatatagcataggcaatgactccttatttttagacattagatatgccaaaatcatagccccgcttctatttactcccgcagcacaatgaaccaacacgggctcgtttcgttgatcacatttagataaaaaggcggttacgtcgtcaaaatatttactaatatcggtagttgtatcatctaccaacggtatatgaataatattaatattagagttaggtaatgtatatttatccatcgtcaaatttaaaacatatttgaacttaacttcagatgatggtgcatccatagcatttttataatttcccaaatacacattattggttacccttgtcattatagtgggagatttggctttgtgcatatctccagttgaacgtagtagtaagtatttatacaaacttttcttatccatttataacgtacaaatggataaaactactttatcggtaaacgcgtgtaatttagaatacgttagagaaaaggctatagtaggcgtacaagcagccaaaacatcaacacttatattctttgttattatattggcaattagtgcgctattactctggtttcagacgtctgataatccagtctttaatgaattaacgagatatatgcgaattaaaaatacggttaacgattggaaatcattaacggatagcaaaacaaaattagaaagtgatagaggtagacttctagccgctggtaaggatgatatatttgaattcaaatgtgtggatttcggcgcctattttatagctatgcgattggataagaaaacatatctgccgcaagctattaggcgaggtactggagacgcgtggatggttaaaaaggcggcaaaggtcgatccatctgctcaacaattttgtcagtatttgataaaacacaagtctaataatgttattacttgtggtaatgagatgttaaatgaattaggttatagcggttattttatgtcaccgcattggtgttccgattttagtaatatggaatagtgttagataaatgcggtaacgaatgttcctgtaaggaaccataacagcttagatttaacgttaaagatgagcataaacataataaacaaaattacaatcaaacttataacattaatatcaaacaatccaaaaaatgaaatcagtggagtagtaaacgcgtacataactcctggataacgtttagcagctgccgttcctattctagaccaaaaattcggtttcatgttttcgaaacggtattctgcaacaagtcgaggatcgtgttctacatatttggcggcattatccagtatctgcctattgatcttcatttcgttttcgattctggctatttcaaaataaaatcccgatgatagacctccagactttataatttcatctacgatgttcagcgccgtagtaactctaataatataggctgataagctaacatcataccctcctgtatatgtgaatatggcatgatttttgtccattacaagctcggttttaactttattgcctgtaataatttctctcatctgtaggatatctatttttttgtcatgcattgccttcaagacgggacgaagaaacgtaatatcctcaataacgttatcgttttctacaataactacatattctacctttttattttctaactcggtaaaaaaattagaatcccatagggctaaatgtctagcgatatttcttttcgtttcctctgtacacatagtgttacaaaaccctgaaaagaagtgagtatacttgtcatcatttctaatgtttcctccagtccactgtataaacgcataatccttgtaatgatctggatcatccttgactaccacaacatttcttttttctggcataacttcgttgtcctttacatcatcgaacttctgatcattaatatgctcatgaacattaggaaatgtttctgatggaggtctatcaataactggcacaacaataacaggagttttcaccgccgccatttagttattgaaattaatcatatacaactctttaatacgagttatattttcgtctatccattgtttcacattgacatatttcgacaaaaagatataaaatgcgtattccaatgcttctctgtttaatgaattactaaaatatacaaacacgtcactgtctggcaataaatgatatcttagaatattgtaacaatttattttgtattgcacatgttcgtgatctatgagttcttcttcgaatggcataggatctccgaatctgaaaacgtataaataggagttagaataataatatttgagagtattggtaatatataaactctttagcggtataattagtttttttctctcaatttctatttttagatgtgatggaaaaatgactaattttgtagcattagtatcatgaactctaatcaaaatcttaatatcttcgtcacacgttagctctttgaagtttttaagagatgcatcagttggttctacagatggagtaggtgcaacaattttttgttctacacatgtatgtactggagccattgttttaactataatggtgcttgtatcgaaaaactttaatgcagatagcggaagctcttcgccgcgactttctacgtcgtaattgggttctaacgccgatctctgaatggatactagttttctaagttctaatgtgattctctgaaaatgtaaatccaattcctccggcattatagatgtgtatacatcggtaaataaaactatagtatccaacgatcccttctcgcaaattctagtcttaaccaaaaaatcgtatataaccacggagatggcgtatttaagagtggattcttctaccgttttgttcttggatgtcatataggaaactataaagtccgcactactgttaagaatgattactaacgcaactatatagtttaaattaagcattttggaaacataaaataactctgtagacgatacttgactttcgaataagtttgcagacaaacgaagaaagaacagacctctcttaatttcagaagaaaactttttttcgtattcctgacgtctagagtttatatcaataagaaagttaagaattagtcggttaatgttgtatttcattacccaagtttgagatttcataatattatcaaaagacatgataatattaaagataaagcgctgactatgaacgaaatagctatatggttcgctcaagaatatagtcttgttaaacgtggaaacgataactgtatttttaatcacgtcagcggcatctaaattaaatataggtatatttattccacacactctacaatatgccacaccatcttcataataaataaattcgttagcaaaattattaattttagtgaaatagttagcgtcaactttcatagcttccttcaatctaatttgatgctcacacggtgcgaattccactctaacatcccttttccatgcctcaggttcatcgatctctataatatctagttttttgcgtttcacaaacacaggctcgtctctcgcgatgagatctgtatagtaactatgtaaatgataactagatagaaagatgtagctatatagatgacgatcctttaagagaggtataataactttaccccaatcagatagactgttgttatggtcttcggaaaaagaatttttataaatttttccagtattttccaaatatacgtacttaacatctaaaaaatccttaatgataataggaatggataatccgtctattttataaagaaatacatatcgcacattatacttttttttggaaatgggaataccgatgtgtctacataaatatgcaaagtctaaatattttttagagaatcttagttggtccaaattcttttccaagtacggtaatagatttttcatattgaacggtatcttcttaatctctggttctagttccgcattaaatgatgaaactaagtcactatttttataactaacgattacatcacctctaacatcatcatttaccagaatactgatcttcttttgtcgtaaatacatgtctaatgtgttaaaaaaaagatcatacaagttatacgtcatttcatctgtggtattcttgtcattgaaggataaactcgtactaatctcttctttaacagcctgttcaaatttatatcctatatacgaaaaaatagcaaccagtgtttgatcatccgcgtcaatattctgttctatcgtagtgtataacaatcgtatatcttcttctgtgatagtcgatacgttataaaggttgataacgaaaatatttttatttcgtgaaataaagtcatcgtaggattttggacttatattcgcgtctagtagatatgcttttatttttggaatgatctcaattagaatagtctctttagagtccatttaaagttacaaacaactaggaaattggtttatgatgtataatttttttagtttttatagattctttattctatacttaaaaaatgaaaataaatacaaaggttcttgagggttgtgttaaattgaaagcgagaaataatcataaattatttcattatcgcgatatccgttaagtttgtatcgtaatggcgtggtcaattacgaataaagcggatactagtagcttcacaaagatggctgaaatcagagctcatctaaaaaatagcgctgaaaataaagataaaaacgaggatattttcccggaagatgtaataattccatctactaagcccaaaaccaaacgagccactactcctcgtaaaccagcggctactaaaagatcaaccaaaaaggaggaagtggaagaagaagtagttatagaggaatatcatcaaacaactgaaaaaaattctccatctcctggagtcagcgacattgtagaaagcgtggccgctgtagagctcgatgatagcgacggggatgatgaacctatggtacaagttgaagctggtaaagtaaatcatagtgctagaagcgatctctctgacctaaaggtggctaccgacaatatcgttaaagatcttaagaaaattattactagaatctctgcagtatcgacggttctagaggatgttcaagcagctggtatctctagacaatttacttctatgactaaagctattacaacactatctgatctagtcaccgagggaaaatctaaagttgttcgtaaaaaagttaaaacttgtaagaagtaaatgcgtgcacttttttataaagatggtaaactctttaccgataataattttttaaatcctgtatcagacgataatccagcgtatgaggttttgcaacatgttaaaattcctactcatttaacagatgtagtagtatatgaacaaacgtgggaggaggcgttaactagattaatttttgtgggaagtgattcaaaaggacgtagacaatacttttacggaaaaatgcatgtacagaatcgcaacgctaaaagagatcgtatttttgttagagtatataacgttatgaaacgaattaattgttttataaacaaaaatataaagaaatcgtccacagattccaattatcagttggcggtttttatgttaatggaaactatgttttttattagatttggtaaaatgaaatatcttaaggagaatgaaacagtagggttattaacactaaaaaataaacacatagaaataagtcccgatgaaatagttatcaagtttgtaggaaaggacaaagtttcacatgaatttgttgttcataagtctaatagactatataaaccgctattgaaactgacggatgattctagtcccgaagaatttctgttcaacaaactaagtgaacgaaaggtatacgaatgtatcaaacagtttggtattagaatcaaggatctccgaacgtatggagtcaattatacgtttttatataatttttggacaaatgtaaagtccatatctcctcttccgtcaccaaaaaagttaatagcattaactatcaaacaaactgctgaagtggtaggtcatactccatcaatttcaaaaagagcttatatggcaacgactattttagaaatggtaaaggataaaaattttttagatgtagtatctaaaactacgttcgatgaattcctatctatagtcgtagatcacgttaaatcatctacggatggatgatatagatctttacacaaataattacaagaccgataaatggaaatggataagcgtatgaaatctctcgcaatgacagctttcttcggagagctaagcacattagatattatggcattgataatgtctatatttaaacgccatccaaacaataccattttttcagtggataaggatggtcagtttatgattgatttcgaatacgataattataaggcttctcaatatttggatctgaccctcactccgatatctggagatgaatgcaagactcacgcatcgagtatagccgaacaattggcgtgtgcggatattattaaagaggatattagcgaatatatcaaaactactccccgtcttaaacgatttataaaaaaataccgcaatagatcagatactcgtatcagtcgagatacagaaaagcttaaaatagctctagctaaaggcatagattacgaatatataaaagacgcttgttaataagtaaatgaaaaaaaactagtcgtttataataaaacacgatatggatgccaacgtagtatcattttctactattgcgacgtatatagacgctttagcgaagaatgcttcggaattagaacagaggtctaccgcatacgaaataaataatgaattggaactagtatttattaagccgccattgattactttgacaaatgtagtgaatatctctacgattcaggaatcgtttattcgatttaccgttactaataaggaaggtgttaaaattagaactaagattccattatctaaggtacatggtctagatgtaaaaaatgtacagttagtagatgctatagataacatagtttgggaaaagaaatcattagtgacggaaaatcgtcttcacaaagaatgcttgttgagactatcgacagaggaacgtcatatatttttggattacaagaaatatggatcctctatccgactagaattagtcaatcttattcaagcaaaaacaaaaaactttacgatagactttaagctaaaatattttctaggatccggtgcccagtctaaaagttctttgttgcacgctattaatcatccaaagtcaaggcctaatacatctctggaaatagaattcacacctagagacaatgaaacagttccatatgatgaactaataaaggaattgacgactctctcgcgtcatatatttatggcttctccagagaatgtaattctttctccgcctattaacgcgcctataaaaacctttatgttgcctaaacaagatatagtaggtttggatctggaaaatctatatgccgtaactaagactgacggcattcctataactatcagagttacatcaaacgggttgtattgttattttacacatcttggttatattattagatatcctgttaagagaataatagattccgaagtagtagtctttggtgaggcagttaaggataagaactggaccgtatatctcattaagctaatagagcctgtgaatgcaatcaatgatagactagaagaaagtaagtatgttgaatctaaactagtggatatttgtgatcggatagtattcaagtcaaagaaatacgaaggtccgtttactacaactagtgaagtcgtcgatatgttatctacatatttaccaaagcaaccagaaggtgttattctgttctattcaaagggacctaaatctaacattgattttaaaattaaaaaggaaaatactatagaccaaactgcaaatgtagtatttaggtacatgtccagtgaaccaattatctttggagaatcgtctatctttgtagagtataagaaatttagcaacgataaaggctttcctaaagaatatggttctggtaagattgtgttatataacggcgttaattatctaaataatatctattgtttggaatatattaatacacataatgaagtgggtattaagtccgtggttgtacctattaagtttatagcagaattcttagttaatggagaaatacttaaacctagaattgataaaaccatgaaatatattaactcagaagattattatggaaatcaacataatatcatagtcgaacatttaagagatcaaagcatcaaaataggagatatctttaacgaggataaactatcggatgtgggacatcaatacgccaataatgataaatttagattaaatccagaagttagttattttacgaataaacgaactagaggaccgttgggaattttatcaaactacgtcaagactcttcttatttctatgtattgttccaaaacatttttagacgattccaacaaacgaaaggtattggcgattgattttggaaacggtgctgacctggaaaaatacttttatggagagattgcgttattggtagcgacggatccggatgctgatgctatagctagaggaaatgaaagatacaacaaattaaactctggaattaaaaccaagtactacaaatttgactacattcaggaaactattcgatccgatacatttgtctctagtgtcagagaagtattctattttggaaagtttaatatcatcgactggcagtttgctatccattattcttttcatccgagacattatgctaccgtcatgaataacttatccgaactaactgcttctggaggcaaggtattaatcactaccatggacggagacaaattatcaaaattaacagataaaaagacttttataattcataagaatttacctagtagcgaaaactatatgtctgtagaaaaaatagctgatgatagaatagtggtatataatccatcaacaatgtctactccaatgactgaatacattatcaaaaagaacgatatagtcagagtgtttaacgaatacggatttgttcttgtagataacgttgatttcgctacaattatagaacgaagtaaaaagtttattaatggcgcatctacaatggaagatagaccgtctacaaaaaactttttcgaactaaatagaggagccattaaatgtgaaggtttagatgtcgaagacttacttagttactatgttgtttatgtcttttctaagcggtaaataataatatggtatgggttctgatctcccagttctaaatgcattaaataattccaatagagcgatttttgttcctataggaccttccaactgtggatactctgtattgttaatagatatattaatacttttgtcgggtaacagaggttctacgtcttctaaaaataaaagttttataacatctggcctgttcataaataaaaacttggcgattctatatatactcttattatcaaatctagccattgtcttatagatgtgagctactgtaggtgtaccatttgattttctttctaatactatatatttctctcgaagaagttcttgcacatcatctgggaataaaatactactgttgagtaaatcagttattttttttatatcgatattgatggacatttttatagttaaggataataagtatcccaaagtcgataacgacgataacgaagtatttatacttttaggaaatcacaatgactttatcagattaaaattaacaaaattaaaggagcatgtatttttttctgaatatattgtgactccagatacatatggatctttatgcgtcgaattaaatgggtctagttttcagcacggcggtagatatatagaggtggaggaatttatagatgctggaagacaagttagatggtgttctacatccaatcatatatctaaagatatacccgaagatatgcacactgataaatttgtcatttatgatatttatacgtttgattcgttcaagaataaacgattggtattcgtacaggtacctccgtcgttaggagatgatagtcatttgactaatccgttattgtcaccgtattatcgtaattcagtagccagacaaatggtcaatgatatgatttttaatcaagattcatttttaaaatatttattagaacatctgattagaagccactatagagtttctaaacatataacaatagttagatacaaggataccgaagaattaaatctaacgagaatatgttataatagagataagtttaaggcgtttgtattcgcttggtttaacggcgtttcggaaaatgaaaaggtactagatacgtataaaaaggtatctaatttgatataatgaattcagtgactgtatcacacgcgccatatactattacttatcacgatgattgggaaccagtaatgagtcaattggtagagttttataacgaagtagccagttggctgctacgagacgagacgtcgcctattcctgataagttctttatacagttgaaacaaccgcttagaaataaacgagtatgtgtgtgtggtatagatccgtatccgaaagatggaactggtgtaccgttcgaatcaccaaattttacaaaaaaatcaattaaggagatagcttcatctatatctagattaaccggagtaattgattataaaggttataaccttaatataatagacggggttataccctggaattattacttaagttgtaaattaggagaaacaaaaagtcacgcgatttactgggataagatttccaagttactgctgcagcatataactaaacacgttagtgttctttattgtttgggtaaaacagatttctcgaatatacgggccaagttagaatccccggtaactaccatagtcggatatcatccagcggctagagaccgccaattcgagaaagatagatcatttgaaattatcaacgttttactggaattagacaacaaggcacctataaattgggctcaagggtttatttattaatgctttagtgaaattttaacttgtgttctaaatggatgcggctattagaggtaatgatgttatctttgttcttaagactataggtgtcccgtcagcgtgcagacaaaatgaagatccaagatttgtagaagcatttaaatgcgacgagttagaaagatatattgagaataatccagaatgtacactattcgaaagtcttagggatgaggaagcatactctatagtcagaattttcatggatgtagatttagacgcgtgtctagacgaaatagattatttaacggccattcaagattttattatcgaggtgtcaaactgtgtagctagattcgcgtttacagaatgcggcgccattcatgaaaatgtaataaaatccatgagatctaatttttcattgactaagtctacaaatagagataaaacaagttttcatattatctttttagatacgtataccactatggatacattgatagctatgaaacgaacactattagaattaagtagatcatctgaaaatccactaaccagatcgatagacactgccgtatataggagaaaaacaactcttcgggttgtaggtactaggaaaaatccaaattgcgacactattcatgtaatgcaaccaccgcatgataatatagaagattacctattcacttacgtggatatgaacaacaatagttattacttttctctacaacaacgattggaggatttagttcctgataagttatgggaaccagggtttatttcattcgaagacgctataaaaagagtttcaaaaatattcattaattctataataaactttaatgatctcgatgaaaataattttacaacggtaccactggtcatagattacgtaacaccttgtgcattatgtaaaaaacgatcgcataaacatccgcatcaactatcgttggaaaatggtgctattagaatttacaaaactggtaatccacatagttgtaaagttaaaattgttccgttggatggtaataaactgtttaatattgcacaaagaattttagacactaactctgttttattaaccgaacgaggagaccatatagtttggattaataattcatggaaatttaacagcgaagaacccttgataacaaaactaattttgtcaataagacatcaactacctaaggaatattcaagcgaattactctgtccaagaaaacgaaagactgtagaagctaacatacgagacatgttagtagattcagtggagaccgatacctatccggataaacttccgtttaaaaatggtgtattggacctggtagacggaatgttttactctggagatgatgctaaaaaatatacgtgtactgtatcaaccggatttaaatttgacgatacaaagttcgtcgaagacagtccagaaatggaagagttaatgaatatcattaacgatatccaaccattaacggatgaaaataagaaaaatagagagctatatgaaaaaacattatctagttgtttatgcggtgctaccaaaggatgtttaacattcttttttggagaaactgcaactggaaagtcgacaaccaaacgtttgttaaagtctgctatcggtgacctgtttgttgagacgggtcaaacaattttaacagatgtattggataaaggacctaatccatttatcgctaacatgcatttgaaaagatctgtattctgtagcgaactacctgattttgcctgtagtggatcaaagaaaattagatctgacaatattaaaaagttgacagaaccttgtgtcattggaagaccgtgtttctccaataaaattaataatagaaaccatgcgacaatcattatcgatactaattacaaacctgtttttgataggatagataacgcattaatgagaagaattgccgtcgtgcgattcagaacacacttttctcaaccttctggtagagaggctgctgaaaataatgacgcgtacgataaagtcaaactattagacgaggggttagatggtaaaatacaaaataatatatatagatttgcatttctatacttgttggtgaaatggtacaaaaaatatcatgttcctattatgaaactatatcctacacccgaagagattcctgactttgcattctatctcaaaataggtactctgttggtatctagctctgtaaagcatattccattaatgacggacctctccaaaaagggatatatattgtacgataatgtggtcactcttccgttgactactttccaacagaaaatatccaagtattttaattctagactatttggacacgatatagagagcttcatcaatagacataagaaatttgccaatgttagtgatgaatatctgcaatatatattcatagaggatatttcatctccgtaaatatatgctcatatatttatagaagatatcacatatctaaatgaataccggaatcatagatttatttgataatcatgttgatagtataccaactatattacctcatcagttagctactctagattatctagttagaactatcatagatgagaacagaagcgtgttattgttccatattatgggatcaggtaaaacaataatcgctttgttgttcgccttggtagcttccagatttaaaaaggtttacattctagtgccgaacatcaacatcttaaaaattttcaattataatatgggtgtagctatgaacttgtttaatgacgaattcatagctgagaatatctttattcattccacaacaagtttttattctcttaattataacgataacgtcattaattataacggattatctcgctacaataactctatttttatcgttgatgaggcacataatatctttgggaataatactggagaacttatgaccgtgataaaaaataaaaacaagattccttttttactattgtctggatctcccattactaacacacctaatactctgggtcatattatagatttaatgtccgaagagacgatagattttggtgaaattattagtcgtggtaagaaagtaattcagacacttcttaacgaacgcggtgtgaatgtacttaaggatttgcttaaaggaagaatatcatattacgaaatgcctgataaagatctaccaacgataagatatcacggacgtaagtttctagatactagagtagtatattgtcacatgtctaaacttcaagagagagattatatgattactagacgacagctatgttatcatgaaatgtttgataaaaatatgtataacgtgtcaatggcagtattgggacaacttaatctgatgaataatttagatactttatttcaggaacaggataaggaattgtacccaaatctgaaaataaataatggcgtgttatacggagaagaattggtaacgttaaacattagttccaaatttaaatactttattaatcggatacagacactcaacggaaaacattttatatacttttctaattctacatatggcggattggtaattaaatatatcatgctcagtaatggatattctgaatataatggttctcagggaactaatccacatatgataaacggcaaaccaaaaacatttgctatcgttactagtaaaatgaaatcgtctttagaggatctattagatgtgtataattctcctgaaaacgatgatggtagtcaattgatgtttttgttttcatcaaacattatgtccgaatcctatactctaaaagaggtaaggcatatttggtttatgactatcccagatactttttctcaatacaaccaaattcttggacgatctattagaaaattctcttacgccgatatttctgaaccagttaatgtatatcttttagccgccgtatattccgatttcaatgacgaagtgacgtcattaaacgattacacacaggatgaattaattaatgttttaccatttgacatcaaaaagctgttgtatctaaaatttaagacgaaagaaacgaatagaatatactctattcttcaagagatgtctgaaacgtattctcttccaccacatccatcaattgtaaaagttttattgggagaattggtcagacaatttttttataataattctcgtattaagtataacgataccaagttacttaaaatggttacatcagttataaaaaataaagaagacgctaggaattacatagatgatattgtaaacggtcacttctttgtatcgaataaagtatttgataaatctcttttatacaaatacgaaaacgatattattacagtaccgtttagactttcctacgaaccatttgtttggggagttaactttcgtaaagaatataacgtggtatcttctccataaaactgatgagatatataaagaaataaatgtcgagctttgttaccaatggatacctttccgttacattggaaccacacgagctgacgttagacataaaaactaatattaggaatgccgtatataagacgtatctccatagagaaattagtggtaaaatggccaagaaaatagaaattcgtgaagacgtggaattacctctcggcgaaatagttaataattctgtagttataaacgttccgtgtgtaataacctacgcgtattatcacgttggggatatagtcagaggaacattaaacatcgaagatgaatcaaatgtaactattcaatgtggagatttaatctgtaaactaagtagagattcgggtactgtatcatttagcgattcaaagtactgcttttttcgaaatggtaatgcgtatgacaatggcagcgaagtcactgccgttctaatggaggctcaacaaggtatcgaatctagttttgtttttctcgcgaatatcgtcgactcataaaaaagagaatagcggtaagtataaacacgaatactatggcaataattgcgaatgttttattctcttcgatatatttttgataatatgaaaaacatgtctctctcaaatcggacaaccatctcataaaatagttctcgcgcgctggagaggtagttgccgctcgtataatctctccagaataatatacttgcgtgtcgtcgttcaatttatacggatttctatagttctctgttatataatgcggtttgccctcatgattagacgacgacaatagtgttctaaatttagatagttgatcagaatgaatgtttattggcgttggaaaaattatccatacagcgtctgcagagtggttgatagttgttcctagatatgtaaaataatccaacttactaggcagcaaattgtctagataaaatactgaatcaaacggtgcagacgtattggcggatctaatggaatccaattgattaactatcttttgaaaatatacatttttatgatccaatacttgtaagaatatagaaataatgataagtccatcatcgtgtttttttgcctcttcataagaactatattttttcttattccaatgaacaagattaatctctccagagtatttgtacacatctatcaagtgattggatccataatcgtcttcctttccccaatatatatgtagtgatgataacacatattcattggggagaaaccctccacttatatatcctcctttaaaattaatccttactagttttccagtgttctggatagtggttggtttcgactcattataatgtatgtctaacggcttcaatcgcgcgttagaaattgcttttttagtttctatattaataggagatagttgttgcggcatagtaaaaatgaaatgataactgtttaaaaatagctcttagtatgggaattacaatggatgaggaagtgatatttgaaactcctagagaattaatatctattaaacgaataaaagatattccaagatcaaaagacacgcatgtgtttgctgcgtgtataacaagtgacggatatccgttaataggagctagaagaacttcattcgcgttccaggcgatattatctcaacaaaattcagattctatctttagagtatccactaaactattacggtttatgtactacaatgaactaagagaaatctttagacggttgagaaaaggttctatcaacaatatcgatcctcactttgaagagttaatattattgggtggtaaactagataaaaaggaatctattaaagattgtttaagaagagaattaaaagaggaaagtgatgaacgtataacagtaaaagaatttggaaatgtaattctaaaacttacaacacgggataaattatttaataaagtatatataagttattgcatggcgtgttttattaatcaatcgttggaggatttatcgcatactagtatttacaatgtagaaattagaaagattaaatcattaaatgattgtattaacgacgataaatacgaatatctgtcttatatttataatatgctagttaatagtaaatgaacttttacagatctagtataattagtcagattattaagtataatagacgactagctaagtctattatttgcgaggatgactctcaaattattacactcacggcattcgttaaccaatgcctatggtgtcataaacgagtatccgtgtccgctattttattaactactgataacaaaatattagtatgtaacagacgagatagttttctctattctgaaataattagaactagaaacatgtttagaaagaaacgattatttctgaattattccaattatttgaacaaacaggaaagaagtatactatcgtcatttttttctctagatccagctactactgataatgatagaatagacgctatttatccgggtggcatacccaaaaggggtgagaatgttccagagtgtttatccagggaaattaaagaagaagttaatatagacaattcttttgtattcatagacactcggttttttattcatggcatcatagaagataccattattaataaattttttgaggtaatcttctttgtcggaagaatatctctaacgagtgatcaaatcattgatacatttaaaagtaatcatgaaatcaaggatctaatatttttagatccgaattcaggtaatggactccaatacgaaattgcaaaatatgctctagatactgcaaaacttaaatgttacggccatagaggatgttattatgaatcattaaaaaaattaactgaggatgattgattaaaaaatataaattaatttaccatcgtgtatttttataacgggattgtccggcatatcatgtagatagttaccgtctacatcgtatactcgaccatctacgcctttaaatcctctatttattgacattaatctattagaattggaataccaaatattagtaccctcaattagtttattggtaatattttttttagacgatagatcgatggctcttgaaaccaaggttttccaaccggactcattgtcgatcggtgagaagtctttttcattagcatgaatccattctaatgatgtatgtttaaacactctaaacaattggacaaattcttttgatttgctttgaatgatttcaaataggtcttcgtctacagtaggcataccattagataatctagccattataaagtgcacgtttacatatctacgttctggaggagtaagaacgtgactattgagacgaatggctcttcctactatctgacgaagagacgcctcgttccatgtcatatctaaaatgaagatatcattaattgagaaaaaactaataccctcgcctccactagaagagaatacgcatgttttaatgcattctccgttagtgtttgattcttggttaaactcagccaccgccttgattctagtatcttttgttctagatgagaactctatattagagataccaaagactttgaaatatagtaataagatttctattcctgactgattaacaaatggttcaaagactagacatttaccatgggatgctaatattcccaaacatacatctataaatttgacgcttttctcttttaattcagtaaatagagagatatcagccgcactagcatcccctttcaatagttctccctttttaaaggtatctaatgcggatttagaaaactctctatctcttaatgaatttttaaaatcattatatagtgttgctatctcttgcgcgtattcgcccggatcacgattttgtctttcaggaaagctatcgaacgtaaacgtagtagccatacgtctcagaattctaaatgatgatatacctgtttttatttcagcgagtttagccttttgataaatttcttcttgctttttcgacatattaacgtatcgcattaatactgttttcttagcgaatgatgcagacccttctacgtcatcaaaaatagaaaactcgttattaactatatacgaacatagtcctcctagtttggagactaattctttttcatcgactagacgtttattctcaaatagcgattggtgttgtaaggatcctggtcgtagtaagttaaccaacatggtgaattcttgcacactattgacgataggtgtagccgataaacaaatcatcttatggttttttaacgcaatggtcttagataaaaaattatatactgaacgagtaggacggatcttaccatcttctttgattaatgatttagaaatgaagttatgacattcatcaataatgacgcatattctactcttggaattaatagttttgatattagtaaaaaatttatttctaaaattttgatcatcgtaattaataaaaatacaatccttcgttatctctggagcgtatctgagtatagtgttcatccaaggatcttctatcaaagcctttttcaccaataagataatagcccaattcgtataaatatccttaagatgtttgagaatatatacagtagtcattgttttaccgacacccgtttcatggaacaataaaagagaatgcatactgtctaatcctaagaaaactcttgctacaaaatgttgataatccttgaggcgtactacgtccgaccccatcatttcaacgggcatattagtagttctgcgtaaggcataatcgatataggccgcgtgtgatttactcatttatgagtgataagtaataactatgttttaaaaatcacagcagtagtttaactagtcttctctgatgtttgttttcgatactttttgaatcagaagtcatactagaataaagcaacgagtgaacgtaatagagagcttcgtatactctattcgaaaactctaagaacttattaatgaattccgtatccactggattgtttaaaatactaaattgaacactgttcacatccttccaagaagaagacttagtgacggacttaacatgagacataaataaatccaaattttttttacaaacatcactagccaccataatggcgctatctttcaaccagctatcgcttacgcattttagcagtctaacatttttaaagagactacaatatattctcatagtatcgattacacctctaccgaataaagttggaagtttaataatacaatatttttcgtttacaaaatcaaataatggtcgaaacacgtcgaaggttaacatcttataatcgctaatgtatagattgttttcagtgagatgattattagatttaatagcatctcgttcacgtttgaacagtttattgcgtgcgctgaggtcggcaactacggcgtccgctttagtactcctcccataatactttacgctattaatctttaaaatttcatagactttatctagatcgctttctggtaacatgatatcatgtgtaaaaagttttaacatgtcggtcggcattctatttagatcattaactctagaaatctgaagaaagtaattagctccgtattccagactaggtaatgggcttttacctagagacagattaagttctggcaatgtttcataaaatggaagaaggacatgcgttccctcccggatattttttacaatttcatccatttacaactctatagtttgttttcattattattagttattatctcccataatcttggtaatacttaccccttgatcgtaagataccttatacaggtcattacatacaactaccaattgtttttgtacataatagattggatggttgacatccatggtggaataaactactcgaacagatagtttatctttccccctagatacattagccgtaatagttgtcggcctaaagaatatctttggtgtaaagttaaaagttagggttcttgttccattattgctttttgtcagtagttcattataaattctcgagatgggtccgttctctgaatatagaacatcatttccaaatctaacttctagtctagaaataatatcggtcttattcttaaaatctattcccttgatgaagggatcgttaatgaacaaatccttggcctttgattcggctgatctattatctccgttatagacgttacgttgactagtccaaagacttacaggaatagatgtatcgatgatgttgatactatgtgatatgtgagcaaagattgttctcttagtggcatcactatatgttccagtaatggcggaaaactttttagaaatgttatatataaaagaattttttcgtgttccaaacattagcagattagtatgaagataaacactcatattatcaggaacattatcaatttttacatacacatcagcatcttgaatagaaacgataccatcttctggaacctctacgatctcggcagactccggataaccagtcggtgggccatcgctaacaataactagatcatccaacaatctactcacatatgcatctatataatctttttcatcttgtgagtaccctggatacgaaataaatttattatccgtatttccataataaggtttagtataaacagagagagatgttgccgcatgaacttcagttacagtcgccgttggttggtttatttgacctattactctcctaggtttctctataaacgatggtttaatttgtacattcttaaccatatatccaataaagctcaattcaggaacataaacaaattctttgttgaacgtttcaaagtcgaacgaagagtcacgaataacgatatcggatactggattgaaggttaccgttacggtaatttttgaatcggatagtttaagactgctgaatgtatcttccacatcaaacggagttttaatataaacgtatactgtagatggttctttaatagtgtcattaggagttaggccaatagaaatatcattaagttcactagaatatccagagtgtttcaaagcaattgtattattgatacaattattatataattcttcgccctcaatttcccaaataacaccgttacacgaagagatagatacgtgattaatacatttatatccaacatatggtacgtaactgaatcttcccatacctttaacttctggaagttccaaactcagaaccaaatgattaagcgcagtaatatactgatccctaatttcgaagctagcgatagcctgattgtctggaccatcgtttgtcataactccggatagagaaatatattgcggcatatacaaagttggaatttgactatcgactgcgaagacattagaccgtttaatagagtcatccccaccgatcaaagaattaatgatagtattattcattttctatttaaaatggaaaaagcttacaataaactccgtagagaaatatctataatttgtgagttttccttaaagtaacagcttccgtaaacgccgtctttatctcttagtaggtttattgtatttatgaccttttccttatcttcatagaatactaaaggcaacaaagaaatttttggttcttctctaagagctacgtgagacttaaccatagaagccaacgaatccctacatattttagaacagaaataccctacttcaccacccttgtatgtctcaatactaataggtctaaaaaccaaatcttgattacaaaaccaacacttatcaattacactatttgtcttaatagacacatctgccatagatttataatactttggtagtatacaagcgagtgcttcttctttagcgggcttaaagactgctttaggtgctgaaataaccacatctggaaggcttactcgcttagccatttaattacggaactatttttttatacttctaatgagcaagtagaaaacctctcatctacaaaaacgtactcgtgtccataatcctctaccatagttacacgttttttagatctcatatgtgctaaaaagttttcccatactaattggttactattatttttcgtataatttttaacagtttgaggttttagatttttagttacagaagtgatatcgaatattttatccaaaaagaatgaataattaattgtcttagaaggagtgttttcttggcaaaagaataccaagtgcttaaatatttctactacttcattaatcttttctgtactcagattcagtttctcatcttttacttgattgattatttcaaagactaacttataatcctttttatttattctctcgttagccttaagaaaactagatacaaaatttgcatctacatcatccgtggatatttgatttttttccatgatatccaagagttccgagataatttctccagaacattgatgagacaataatctccgcaatacatttctcaaatgaataagtttattagacacgtggaagtttgactttttttgtacctttgtacatttttgaaataccgactcgcaaaaaatacaatattcatatccttgttcagatactataccgttatgtctacaaccgctacataatcgtagattcatgttaacactctacgtatctcgtcgtccaatattttatataaaaacattttatttctagacgttgccagaaaatcctgtaatatttttagttttttgggctgtgaataaagtatcgccctaatattgttaccgtcttccgccaatatagtagttaaattatccgcacatgcagaagaacaccgcttaggcggattcagtacaatgttatatttttcgtaccaactcatttaaatatcataatctaaaatagttctgtaatatgtctagcgctaatatattgatcataatcctgtgcataaattaagatacaacaatgtctcgaaatcatcgacatggcttcttccatagttagaagatcgtcgtcaaagttagcaacgtgattcatcaacatttgctgttttgaggcagcaaatactgaaccgtcgccattcaaccattcataaaaaccatcgtctgaatccattgataatttcttgtactggtttttgagagctcgcatcaatctagcatttctagctcccggattgaaaacagaaagaggatcgtacatccagggtccattttctgtaaatagaatcgtataatgtcccttcaagaagatatcagacgatccacaatcaaagaattggtctccgagtttgtaacaaactgcggactttaacctatacatgataccgtttagcataatttctggtgatacgtcaatcggagtatcatctattagagatctaaagccggtgtaacattctccaccaaacatattcttattctgacgtcgttctacataaaacatcattgctccattaacgataacaggggaatgaacagcactacccatcacattagttcccaatggatcaatgtgtgtaactccagaacatcttccatagcctatgttaggaggagcgaacaccactcttccactattgccatcgaatgccatagaataaatatccttggaattgatagaaatcggactgtcggatgttgtgatcatcttcataggattaacaactatgtatggtgccgcctgaagtttcatatcgtaactgatgccgtttataggtctagccacagaaaccaacgtaggtctaaatccaactatagacaaaatagaagccaatatctgttcctcatctgtcataacttgagagcatccagtatgaataatcttcattagatggggatctaccgcatcatcatcgttacaataaaaaattcccattctaatgttcataattgcttttctaatcatggtatgcatgtttgctctctgaatctctgtggaaattagatctgatacacctgtaatcactatcggattatcctccgtaagacgattaaccaacaacatataattataagactttacttttctaaattcataaagttgctggattaggctataggtgtctccatgtacatacgcgttctcgagcgcaggaagtttaataccgaatagtgccatcagaataggatgaatatagtaattagtttctggttttctataaataaaagacaaatcttgtgaactagacatatcggtaaaatgcatggattggaatcgtgtagtcgacagaagaatatgatgattagatggagagtatattttatctaactctttgagttggtcaccgattctaggactagctcgagaatgaataagtactaaaggatgagtacatttcacagaaacactagcattgttcaatgtgctctttacatgggtaaggagttgaaatagctcgtttctatttgttctgacaatatttagtttattcataatgttaagcatatcctgaatagtaaagttagatgtgtcatacttgttagtagttagatatttagcaattgcattcccatcatttctcaatctcgtactccaatcatgcgtggatgctacttcgtcgatggaaaccatacaatcctttttgataggctgttgagattgatcatttcctgcacgtttaggtttggtacgttgatttctagcccctgcggatataaagtcatcgtctacaatttgggacaatgaattgcatacactacaagacaaagatttatcagaagtgtgaatatgatcttcatctaccaaagaaagagtttgattagtataactagattttagtcctgcgttagatgttaaaaaaacatcgctattgaccacggcttccattatttatattcgtagtttttactcgaaagcgtgattttaatatccaatcttattacttttggaatcgttcaaaacctttgactagttgtagaatttgatctattgccctacgcgtatactcccttgcatcatatacgttcgtcaccagatcgtttgtttcggcctgaagttggtgcatatctctttcaacattcgacatgagatccttaagggccatatcgtctagattttgttgagatgctgctcctggatttggattttgttgtgctgttgtacatactgtaccaccagtaggtgtaggagtacatacagtggccacaataggaggttgagaaagtgtaaccgttggagtagtacaagaaatacttccatccgattgttgtgtacatgtagttgttggtaacgtctgagaaggttgggtagatggcggcgtcgtcgttttttgatctttattaaatttagagataatatcctgaacagcattgctcggcgtcaacgctggaaggagtgaactcgccggcgcatcagtatcttcagacagccaatcaaaaagattagacatatcagatgatgtattagtttgttgtcgtggttttggtgtaggagcagtactactaggtagaagaataggagccgatgtagctgttggaaccggctgtggagttatatgaatagttggttgtagcggttggataggctgtctgctggcggccatcatattatctctagctagttgttctcgcaactgtctttgataatacgactcttgagactttagtcctatttcaatcgcttcatcctttttcgtatccggatccttttcttcagaataatagattgacgactttggtgtagaggattctgccagcctctgtgagaacttgttaaagaagtccatttaaggctttaaaattgaattgcgattataagattaaatggcagacacagacgatattatcgactatgaatccgatgatctcaccgaatacgaggatgatgaagaagaggaagaagatggagagtcactagaaactagtgatatagatcccaaatcttcttataagattgtagaatcagcatccactcatatagaagatgcgcattccaatcttaaacatatagggaatcatatatctgctcttaaacgacgctatactagacgtataagtctatttgaaatagcgggtataatagcagaaagctataacttgcttcaacgaggaagattacctctagtttcagaattttctgacgaaacgatgaagcaaaatatgctacatgtaattatacaagagatagaggagggttcttgtcctatagtcatcgaaaagaacggagaattgttgtcggtaaacgattttgacaaagatggtctaaaattccatctagactatattatcaaaatttggaaacttcaaaaacgatattagaatttatacgaatatcgttctctaaatgtcacaatcaagtctcgcatgttcagcaatttattgtcgtactttatatcgtgttcattaacgatatcttgcaaaatagtaatgattctatcttccttcgatagatattcttcagagattattgtcttatattctttcttgttatcagatatgaatttgataagactttgaacattattgatacccgtctgtttaattttttctacagatattttagttttggcagattctatcgtatctgtcaatagacatccaacatcgacattcgacgtcaattgtctataaatcaacgtataaattttagaaataacattagcgaattgttgtgcgttgatgtcgttattctgaaacagtatgattttaggtagcattttcttaacaaagagaacgtatttattgttactcagttgaacagatgatatatccagattactaacgcatctgattccgtataccaaactttcagaagaaatggtatacaattgtttgtattcattcaatgtctctttttcagaaattagtttagagtcgaatactgcaataattttcaagagatagttttcatcagataagattttatttagtgtagatatgataaaactattgttttgttggagaacttgatacgccgcgttctctgtagtcgacgctctcaaatgggaaacaatctccattatttttttggaatcggatactatatcttcggtatcttgacgcagtctagtatacatagagttaagagagattagagtttgtacattaagcaacatgtctctaaatgtggctacaaacttttcctttttcacatcatctagtttattatataccgatttcacaacggcaccagatttaaggaaccagaatgaaaaactctgataactacaatatttcatcatagttacgattttatcatcttctatagttggtgtaatagcgcatacctttttctccaagactggaaccaacgtcataaaaatgtttaaatcaaaatccatatcaacatctgatgcgctaagaccagtctcgcgttcaagattatctttactaatggtgacgaactcatcgtataaaactctaagtttgtccattatttatttacagatttagttgtttaatttatttgtgctcttccagagttgggatagtatttttctaacgtcggtattatattattaggatctacgttcatatgtatcataatattaatcatccacgttttgataaatctatctttagcttctgaaataacgtatttaaacaaaggagaaaaatatttagctacggcatcagacgcaataacattttttgtaaatgtaacgtatttagacgacagatcttcgttaaaaagttttccatctatgtagaatccatcggttgttaacaccattcccgcgtcagattgaataggagtttgaatagtttgttttggaaatagatccttcaataacttatagttgggtgggaaaaaatcgattttatcactagactctttcttttttactatcattacctcatgaactatttcttgaatgagtatatgtattttctttcctatatcggacgcgttcattggaaaatataccatgtcgttaactataagaatatttttatcctcgtttacaaactgaataatatcagatgtagttcgtaaacgaactatatcatcaccagcacaacatctaactatatgatatccactagtttcctttagccgtttattatcttgttccatattagcagtcattccatcatttaagaaggcgtcaaaaataatagggagaaatgacattttggattctgttacaactttaccaaaattaaggatatacggacttactatctttttctcaacgtcaatttgatgaacacacgatgaaaatgtgcttctatgagattgatcatgtagaaaacaacaagggatacaatatttccgcatatcatgaaatatattaagaaatcccaccttattatatttccccaaaggatccatgcacgtaaacattatgccgttatcattaataaagacttctttctcatcggatctgtaaaagttgttactgatttttttcattccaggatctagataattaataatgatgggttttctattcttattctttgtattttggcatatcctagaccagtaaacagtttccactttggtaaaatcagcagacttttgaacgctattaaacatggcattaatggcaataactaaaaatgtaaaatatttttctatgttaggaatatggtttttcactttaatagatatatggtttttggccaaaatgatagatatttttttatccgaggatagtaaaatattattagtcgccgtctctataaaaatgaagctagtctcgatatccaattttattctagaattgataggagtcgccaaatgtaccttatacgttatatctcccttgatgcgttccatttgtgtatctatatcggacacaagatctgtaaatagttttacgttattaatcatcacggtatcgccgtcgctagataacgctaatgtaccatccaagtcccaaatggagagatttaactgttcatcgtttagaataaaatgattaccggtcatattaataaagtgttcatcgtatctagataacaacgacttataattaatgtccaagtcttgaactcgctgaatgatcttttttaacccagttagttttagattggtacgaaatatattgttaaactttgattctacagtaatgtccaaatctagttgtggaaatacttccatcaacattgtttcaaacttgataatattattatctacatcttcgtacgatccaaattccggaatagatgtatcgcacgctctggccacccagataaccaaaaagtcacacgctccaggatatacattgtataaaaagctatcgttttttagtagggtttttttctgcgtgtatacgaagggattaaaaatagtattatcaacgtaactatattccaaattattcttatgagaatagataataatatcgtccttaatatctaacaaatttcctaaatatccctttaattgagtcattcgaagcgtcaatagaatatgtctcttaactatttccggctgttgtatatttaaatgacttcgtaaaaaataatatatgggcgacttctcatctatgtaatcatatggagtgagatatagggctcgttctacctcctgccccttacccacctgtaataccaattgcggacttactatatatcgcatatttatatcgtggggtaaagtgaaaatctactaccgatgatgtaagtcttacaatgttcgaaccagtaccagatcttaatttggaggcctccgtagaactaggggaggtaaatatagatcaaacaacacctatgataaaggagaatagcggttttatatcccgcagtagacgtctattcgcccatagatctaaggatgatgagagaaaactagcactacgattctttttacaaagactttattttttagatcatagagagattcattatttgttcagatgcgttgacgctgtaaaagacgtcactattaccaaaaaaaataacattatcgtggcgccttatatagcacttttaactatcgcatcaaaaggatgcaaacttacagaaacaatgattgaagcattctttccagaactatataatgaacatagtaagaaatttaaattcaactctcaagtatccatcatccaagaaaaactcggataccagtttggaaactatcacgtttatgattttgaaccgtattactctacagtagctctggctattcgagatgaacattcatctggcatttttaatatccgtcaagagagttatctggtaagttcattatctgaaataacatatagattttatctaattaatctaaaatctgatcttgttcaatggagtgctagtacgggcgctgtaattaatcaaatggtaaatactgtattgattacagtgtatgaaaagttacaactggtcatagaaaatgattcacaatttacatgttcattggctgtggaatcaaaacttccaataaaattacttaaagatagaaatgaattatttacaaaattcattaacgagttaaaaaagaccagttcattcaagataagcaaacgcgataaggatacgctactaaaatattttacttaggactggagttagaatttatagacgactcatttcgtttatcattgttactattattactattactatcattattagtgttggcattattagtattcttcttgtcatcttgttcagaaatatacagcaatgctatacctaatactaaatacattatcatgctcgcaatggctctaacaacaacgaaccaaaatgaatttggtcgtagcttttgttcacaaaaatacataaagaaatgtctacataaatctatggcgccattggctacttgaaatagcgccagtcctcctacagattttaatatagctgtataacatgacatttattcatcatcaaaagagacagagtcaccatctgtcatatttagattttttttcatgtgttcaaagtatcctctactcatttcattataatagtttatcatacttagaattttaggacggatcaatgagtaagacttgactagatcgtcagtagtaatttgtgcatcgtctattctgcatccgcttcgtcgaataatgtatagcatcgctttgagattctccatagctatcaagtctttatacaatgacatggaaatatctgtgaatactttatacttctccaacatcgatgccttaacatcatcgcctactttagcattgaaaatacgttctattgtgtagatggatgtagcaagatttttaaacaacaatgccatcttacacgatgattgcctcaagtctccaatcgtttgtttagaacgattagctacagagtccaatgcttggctgactagcatattattatctttagaaattgtattcttcaatgaggcgtttatcatatctgtgatttcgttagtcatattacagtctgactgggttgtaatgttatccaacatatcacctatggatacggtacacgtaccagcatttgtaataatcctatctaagatgttgtatggcattgcgcagaaaatatcttctcctgtaatatctccactctcgataaatctactcagattattcttaaatgccttattctctggagaaaagatatcagtgtccatcatttcattaatagtatacgcagaaaagataccacgagtatcaattctatccaagatacttatcggttccgagtcacagataatggtttcctctccttcgggagatcctgcatagaaatatctaggacaatagtttctatactgtctgtaactctgataatctctaaagtcactaactgataccatgaaattgagaagatcaaacgctgaagtaattaatttttctgcctcgtttttactacaactagttttcatcaatgtagtgacgatgtattgtttagttacttttggtctaatactgatgatagagatattattgcttcccataatggatcttctagtagtcaccttaaagcccattgatgcgaatagcagatagataaagtcttggtatgactcctttctaatatagtacggactacctttgtcacccaactttatacccacataagccataacaacctctttaatagccgtttcatgaggtttatcagccatgagcctgagtagttggaagaatctcatgaatcccgtctcagaaagtcctatatgcatgatagatttatctttcctgggaaactctcgtatagtcatagatgaaatactctttaaagtttctgaaataagattagtaacagtcttacctccgactactctaggtaacaaacaaactctaataggtgttttctctgcggagataatatcagaaaggatagagcaataagtagtattattgtgattataaagaccgaatacataacaggtagaatttataaacatcatgtcctgaaggtttttagacttgtattcctcgtaatccataccgtcccaaaacatggatttggtaactttgatagccgtagatctttgttccttcgccaacaggttaaagaaattaataaagaatttgttgtttctatttatgtccacaaattgcacgtttggaagcgccacggttacattcactgcagcattttgaggatcgcgagtatgaagtacgatgttattgtttactggtatatctggaaagaaatctaccagtctaggaataagagattgatatcgcatagaaatagtaaagtttataatctcatcatcgaagagcattttgttaccattgtaataaatatccactctgtcatatgtataaatgaagtactgttcaaacatgatgagatgtttatatgttggcatagtagtgagatcgacgtttggtaatggcaatgtattaagattaactccataatgtctagcagcatctgcgatgttataagcgtcgtcaaagcggggtcgatcttgtattgttatatattgtctaacacctataagattatcaaaatcttgtctgcttaatacaccgttaacaatttttgccttgaattcttttattggtgcattaataacatccttatagaggatgttaaacaaataagtgttatcaaagttaagatctggatatttcttttctgctagaacatccattgagtcggagccatctggtttaatataaccaccgataaatctagctctgtattctgtatccgtcaatctaatattaagaaggtgttgagtgaaaggtggaagatcgtaaaagctgtgagtattaatgataggattagtttccgaactaatgttaattggggtattaataatatctatatttccagcgttaagtgtaacattaaacagttttaattcacgtgacgtggtatcaattaaataattaatgcccaatttggatatagcagcctgaagctcatcttgtttagttacggatcctaatgagttattaagcaatatatcgaacggatgaacgaaggttgttttaagttggtcacatactttgtaatctagacatagatgcggaagaacggtagaaactatacgaaataaatattcagagtcctctaattgatcaagagtaactattgacttaataggcatcatttatttagtattaaatgacgaccgtaccagtgacggatatacaaaacgatttaattacagagttttcagaagataattatccatctaacaaaaattatgaaataactcttcgtcaaatgtctattctaactcacgttaacaacgtggtagatagagaacataatgccgccgtagtgtcatctccagaggaaatatcctcacaacttaatgaagatctatttccagatgatgattcaccggccactattatcgaacgagtacaacctcatactactattattgacgatactccacctcctacgtttcgtagagagttattaatatcggaacaacgtcaacaacgagaaaaaagatttaatattacagtatcgaaaaatgctgaagcaataatggaatctagatctatgataacttctatgccaacacaaacaccatccttgggagtagtttatgataaagataaaagaattcagatgttagaggatgaagtggttaatcttagaaatcaacgatctaatacaaaatcatctgataatttagataattttaccaaaatactatttggtaagactccgtacaaatcaacagaagttaataagcgtatagccatcgttaattatgcaaatttgaacgggtcccccttatcagtcgaggacttggatgtttgttcggaggatgaaatagatagaatctataaaacgattaaacaatatcacgaaagtagaaaacgaaaaattatcgtcactaacgtgattattattgtcataaacattatcgagcaggcattgctaaaactcggatttgaagaaatcaaaggactgagtaccgatatcacttcagaaattatcgatgtggagatcggagatgactgcgatgctgtagcatctaaactaggaatcggtaacagtccggttcttaatattgtattgtttatactcaagatattcgttaaacgaattaaaattatttaatttaatacattcccatatccagacaacaatcgtctggattaatctgttcctgtcgtctcataccggacgacatattaatctttttattagtgggcatctttttagatggtttctttttcccagcattaactgagtcgatacctagaagatcgtgattgatctctccgaccattccacgaacttctaattggccgtctctgacggtaccataaactattttaccagcattagtaacagcttggacaatctgaccatccatcgcattgtacgatgtagtagtaactgttgttctacgtctaggagcaccagaagtatttttggagcccttggatgttgatgtagaagaagacgaggattttgattttggtttacatgtaatacattttgaactctttgattttgtatcacatgcgccggcagtcacatctgtttgagaattaagattattgttgcctcctttgacggctgcatctccaccgatttgcgctagtagatttttaagctgtggtgtaatcttattaactgtttcgatataatcatcgtaactgcttctaacggctaaattttttttatccgccatttagaagctaaaaatatttttatttatgcagaagatttaactagattatacaatgaactaatatgatccttttccagattatttacaaacttggtattttttggttctggaggaggcgaatttaaattcggacttggattcggattttgtaagttcttgatcttattatacatcgagtataggatggcgacagtaactgctacacaaataccgatcaaaagaagaataccaatcatttattgacaataacttcactattgatcaagtatgcaatatatcatcttttcactaaataagtagtaataatgattcaacaatgtcgagatatatggacgataataatttagttcatggaaatatcgctatgattggtgtgaatgactccgctaactctgtggggtgcgcagtgctttccccacatagaataaattagcattccgactgtgataataataccaagtataaacgccataatactcaatactttccatgtacgagtgggactggtagacttactaaagtcaataaaggcgaagatacacgaaagaatcaaaagaatgattccagcgattagcacgccggaaaaataatttccaatcataagcatcatgtccatttaactaataaaaattttaaatcgccgaatgaacaaagtggaatataaaccatataaaaacaatagtttgtactgcaaaaataatatctatttttgttttcgaagatatggtaaaattaaatagtagtacacagcatgttataactaacagcagcaacggctcgtaattacttatcatttactagacgaaaaggtggtgggatattttcttgctcaaataatacgaatatatcacccatccattttatgcgatgtttatatactctaatctttaatagatctatagacgacgggtttaccaacaatatagattttatcgattcatctaatttaaacccttccttaaacgtgaatgatctattatctggcataacgatgaccctacctgatgaatcggacaatgtactgggccatgtagaataaattatcaacgaattatcgtctacgaacatttatatcatttgttttaattttaggacgcgaataaatggatataaaatagaaaataacagatattacaaccagtgttatggccgcgcccaaccaggtaggcagttttattttatcttttactacaggttctcctggatgtacgtcaccaacggcggacgtagttctagtacaattagacgtaagttccgcttgggaattttttaacgctaaagagttaacgttaatcgtgcacccaacgtatttacatctagttcgttgaacatcttgattataatataaccattttctatctctagattcgtcagtgcactcatgtaaccaacataccctaggtcctaaatatttatctccggaattagattttggataattcgcgcaccaacaatttctatttcctttatgatcgttacaaaagacgtataatgccgtatccccaaaagtaaaataatcaggacgaataattctaataaactcagaacaatatctcgcatccatatgtttggagcaaatatcggaataagtagacatagccggtttccgttttgcacgtaaccattctaaacaattggggtttccaggatcgtttctacaaaatccagtcatgaaatcgtcacaatgttctgtcttgtaattattattaaatatttttggacagtgtttggtatttgtcttagaacaacattttgccacgctatcactatcgcccaggagataatccttttttataaaatgacatcgttgcccggatgctatataatcagtagcgtgttttaaatccttaatatattcaggagttacctcgttctgataatagattaatgatccaggacgaaatttgaaagaactacatggttctccatgaattaatacatattgtttagcaaattcaggaactataaaactactacaatgatctatcgacataccatctatcaaacaaaacttgggtttaatttctcccggagatgtttcataatagtacgtataactttcttctgcaaacttaacagctctattatattcaggataattaaaacctaattccatatatttgtctcgtatatctgctattcctggtgctattttgattctattaagagtaacagctgcccccattcttaataatcgtcagtatttaaactgttaaatgttggtatatcaacatctaccttatttcccgcagtataaggtttgttgcaggtatactgttcaggaatggttacatttatacttcttctatagtcctgtctttcgatgttcatcacatatgcaaagaacagaataaacaaaataatgtaagaaataatattaaatatctgtgaattcgtaaatacattgattgccataataattacagcagctacaatacacacaatagacattcccacagtgttgccattacctccacgatacatttgagttactaagcaataggtaataactaagctagtaagaggcaatagaaaagatgagataaatatcatcaatatagagattagaggagggctatatagagccaagacgaacaaaatcaaaccgagtaacgttctaacatcattatttttgaagattcccaaataatcattcattcctccataatcgttttgcatcatacctccatctttaggcataaacgattgctgctgttcctctgtaaataaatctttatcaagcactccagcacccgcagagaagtcgtcaagcatattgtaatatcttaaataactcatttatatattaaaaaatgtcactattaaagatggagtataatctttatgccgaactaaaaaaaatgacttgtggtcaacccctaagtctttttaacgaagacggggatttcgtagaagttgaaccgggatcatcctttaagtttctgatacctaagggattttacgcctctccttccgtaaagacgagtctagtattcgagacattaacaacgaccgataataaaatcactagtatcaatccaacaaatgcgccaaagttatatcctcttcaacgcaaagtcgtatctgaagtagtttctaatatgaggaaaatgatcgaatcaaaacgtcctctatacatcactcttcacttggcgtgtggatttggtaagactattaccacgtgttatcttatggctacacacggtagaaaaaccgtcatttgcgtacccaataaaatgttaatacatcaatggaagacacaggtagaggcagtcggattggaacataagatatccatagatggagtaagtagtctattaaaggaactaaagactcaaagtccggatgtattaatagtagtcagtagacatctgacaaacgatgccttttgtaaatatatcaataagcattatgatttgttcatcttggatgaatcacatacgtataatctgatgaacaatacagcagttacaagatttttagcgtattatcctccgatgatgtgttattttttaactgctacacctagaccatctaaccgaatttattgtaacagtattattaatattgccaagttatccaatctaaaaaaaactatctatgcagtagatagtttttttgagccatattccacagataatattagacatatggtaaaacgactagatggaccatctaataaatatcatatatataccgagaagttattatctgtagacgagcctagaaatcaacttattcttgataccctggtagaagaattcaagtcaggaactattaatcgcattttagttattactaaactacgtgaacatatggtattattctacaaacgattattagattttttcggaccagaggttgtatttataggagacgcccaaaatagacgtactccagatatggtcaaatcaatcaaggaactaaatagatttatattcgtatccaccttattttattccggtactggtttagatattcctagtttggattcgttgttcatttgctcggcagtaatcaacaatatgcaaatagagcaattactagggagggtatgtcgagaaacagaactattagataggacggtatatgtatttcctaacacatccatcaaagaaataaagtacatgataggaaatttcatgcaacgaattattagtctgtctgtagataaactaggatttaaacaaaaaagttatcggaaacatcaagaatccgatcccacttctgcatgtacaacatcatccagagaagaacgtgtattaaatagaatatttaactcgcaaaatcgttaagaagtttaagcgacgatccgcatgctgcgcaggccagtgtattacccctcatagtattaatataatccaatgatacttttgtgatgtcggaaatcttaaccaatttagactgacaggcagaacacgtcatgcaatcatcatcgtcatcgataactgtagtcttgggcttctttttgcgactcttcattccggaacgcacattggtgctatccatttaggtagtaaaaaataagtcagaatatgccctataacacgatcgtgcaaaacctggtatatcgtctctatctttatcacaatatagtgtatcgacatttttattattattgacctcgtttatcttggaacatggaatgggaacatttttgttatcaacggccatctttgccttaattccagatgttgtaaaattataactaaacagtctatcatcgacacaaatgaaattcttgtttagacgtttgtagtttacgtatgcggctcgttcgcgtctcattttttcagatattgcaggtactataatattaaaaataagaatgaaataacataggattaaaaataaagttatcatgacttctagcgctgatttaactaacttaaaagaattacttagtctgtacaaaagtttgagattttcagattctgcggctatagaaaagtataattctttggtagaatggggaacatctacttactggaaaataggcgtgcaaaaggtagctaatgtcgagacgtcaatatctgattattatgatgaggtaaaaaataaaccgtttaatattgatccgggctattacattttcttaccggtatattttgggagcgtctttatttattcgaagggtaaaaatatggtagaacttggatctggaaactcttttcaaataccagatgatatgcgaagtgcgtgtaacaaagtattagacagcgataacggaatagactttctgagatttgttttgttaaacaatagatggataatggaagatgctatatcaaaatatcagtctccagttaatatatttaaactagctagtgagtacggattaaacatacccaaatatttagaaattgaaatagaggaagacacattatttgacgacgagttatactctattatagaacgctctttcgatgataaatttccaaaaatatccatatcgtatattaagttgggagaacttagacggcaagttgtagactttttcaaattctcattcatgtatattgagtccatcaaggtagatcgtataggagataatatttttattcctagcgttataacaaaatcaggaaaaaagatattagtaaaagatgtagaccatttaatacgatccaaggttagagaacatacatttgtaaaagtaaaaaagaaaaacacattttccattttatacgactatgatggaaacggaacagaaactagaggagaagtaataaaacgaattatagacactataggacgagactattatgttaacggaaagtatttctctaaggttggtagtgcaggcttaaagcaattgactaataaattagatattaatgagtgcgcaactgtcgatgagttagttgatgagattaataaatccggaactgtaaaacgaaaaataaaaaaccaatcagcatttgatttaagcagagaatgtttgggatatccagaagcggattttataacgttagttaataacatgcggttcaaaatagaaaattgtaaggttgtaaatttcaatattgaaaatactaattgtttaaataacccgagtattgaaactatatatggaaactttaaccagttcgtctcaatctttaatgtcgtcaccgatgtcaaaaaaagattattcgagtgaaataatatgcgcctttgatataggtgcaaaaaatcctgccagaactgttttagaagtcaaggataactccgttagggtattggatatatcaaaattagactggagttctgattgggaaaggcgcatagctaaagatttgtcacaatatgaatacactacagttcttctagaacgtcagcctagaaggtcgccgtatgttaaatttatctattttattaaaggctttttatatcatacatcggctgccaaagttatttgcgtctcgcctgtcatgtctggtaattcatatagagatcgaaaaaagagatcggtcgaagcatttcttgattggatggacacattcggattgcgagactccgttccggatagacgcaaattagacgatgtagcggatagtttcaatttggctatgagatacgtattagataaatggaatactaattatacaccttataataggtgtaaatctagaaattacataaaaaaaatgtaataacgttagtaacgccattatggataatctatttacctttctacatgaaatagaagatagatatgccagaactatttttaactttcatctaataagttgcgatgaaataggagatatatatggtcttatgaaagaacgcatttcctcagaggatatgtttgataatatagtgtataataaagatatacatcctgccattaagaaactagtgtattgcgacatccaacttactaaacacattattaatcagaatacgtatccggtatttaacgattcttcacaagtgaaatgttgtcattatttcgacataaactcagataatagcaatattagctctcgtacagtagagatatttgagagggaaaagtcatctcttgtatcatatattaaaactaccaataagaagagaaaggtcaattacggcgaaataaagaaaactgttcatggaggcactaatgcaaattacttttccggtaaaaagtctgacgagtatctgagtactacagttagatccaacattaatcaaccttggatcaaaaccatctctaagaggatgagagttgatatcattaatcactctatagtaacgcgtggaaaaagctctatattacaaactatagaaattatttttactaatagaacatgtgtgaaaatattcaaggattctactatgcacattattctatccaaggacaaggatgaaaaggggtgtatacacatgattgacaaattattctatgtctattataatttatttctgttgttcgaagatatcatccaaaacgagtactttaaagaagtagctaatgttgtaaaccacgtactcacggctacggcattagatgagaaattattcctaattaagaaaatggctgaacacgatgtttatggagttagcaatttcaaaatagggatgtttaacctgacatttattaagtcgttggatcataccgttttcccctctctgttagatgaggatagcaaaataaagttttttaaggggaaaaagctcaatattgtagcattacgatctctggaggattgtataaattacgtgactaaatccgagaatatgatagaaatgatgaaggaaagatcgactattttaaatagcatagatatagaaacggaatcggtagatcgtctaaaagaattgcttctaaaatgaaaaaaaacactaattcagaaatggatcaacgactagggtataagtttttggtgcctgatcctaaagccggagttttttatagaccgttacatttccaatatgtatcgtattctaattttatattgcatcgattgcatgaaatcttgaccgtcaagcggccactcttatcgtttaagaataatacagaacgaattatgatagaaattagcaatgttaaagtgactcctccagattactcacctataatcgcgagtattaaaggtaagagttatgacgcattagccacgttcactgtaaatatctttaaagaggtaatgaccaaagagggtatatccatcactaaaataagtagttatgagggaaaagattctcatttgataaaaattccgctactaataggatacgggaataaaaatccacttgatacagccaagtatcttgttcctaatgtcataggtggagtctttatcaataaacaatctgtcgaaaaagtaggaattaatctagtagaaaagattacaacatggccaaaatttagggttgttaagccaaactcattcactttctcgttttcctccgtatcccctcctaatgtattaccgacaagatatcgccattacaagatatctctggatatatcacaattggaagcgttgaatatatcatcgacaaagacatttataacggtcaatattgttttgctgtctcaatatttatctagagtgagtctagaattcattagacgtagtttatcatacgatatgcctccagaagttgtctatctagtaaacgcgataatagatagtgctaaacgaattactgaatctattactgactttaatattgatacatacattaatgacctggtggaagctgaacacattaaacaaaaatctcagttaacgatcaacgagttcaaatatgaaatgctgcataactttttacctcatatgaactatacacccgatcaactaaagggattttatatgatatctttactaagaaagtttctctactgtatcttccacacttctagatatccagatagagattcgatggtttgtcatcgcatcctaacgtacggcaaatattttgagacgttggcacatgatgaattagagaattacataggcaacatccgaaacgatatcatgaacaatcacaagaacagaggcacttacgcggtaaacattcatgtactaacaactcccggacttaatcacgcgttttctagcttattgagtggaaagttcaaaaagtcagacggtagttatcgaacacatcctcactattcatggatgcagaatatttctattcctaggagtgttggattttatccggatcaagtaaagatttcaaagatgttttctgtcagaaaataccatccaagtcaatatctttacttttgttcatcagacgttccggaaagaggtcctcaggtaggtttagtatctcaattgtctgtcttgagttccattacaaatatactaacgtctgagtatttggatttggaaaagaaaatttgtgagtatatcagatcatattataaagatgatataagttactttgaaacaggatttccaatcactatagaaaatgctctagtcgcatctcttaatccaaatatgatatgtgattttgtaactgactttagacgtagaaaacggatgggattcttcggtaacttggaggtaggtattactttagttagggatcacatgaatgaaattcgcattaatattggagcgggaagattagtcagaccattcttggttgtggataacggagagctcatgatggatgtgtgtccggagttagaaagcagattagacgacatgacattctctgacattcagaaagagtttccgcatgtcatcgaaatggtagatatagaacaatttacttttagtaacgtatgtgaatcggttcaaaaatttagaatgatgtcaaaggatgaaagaaagcaatacgatttatgtgactttcctgccgaatttagagatggatatgtagcatcttcattagtgggaatcaatcacaattctggacccagagctattcttggatgtgctcaagctaaacaagctatctcttgtctgagctcggatatacgaaataaaatagacaatggaattcatttgatgtatccagagaggccaatcgtgattagtaaggctttagaaacttcaaagattgcggctaattgcttcggccaacatgttactatagcattaatgtcgtacaaaggtatcaatcaagaggatggaattatcatcaaaaaacaatttattcagagaggcggtctcgatattgttacagccaagaaacatcaagtagaaattccattggaaaactttaataacaaagaaagagataggtctaacgcctattcaaaattagaaagtaatggattagttagactgaatgctttcttggaatccggagacgctatggcacgaaatatctcatcaagaactcttgaagatgattttgctagagataatcagattagcttcgatgtttccgagaaatataccgatatgtacaaatctcgcgttgaacgagtacaagtagaacttactgacaaagttaaggtacgagtattaaccatgaaagaaagaagacccattctaggagacaaatttaccactagaacgagtcaaaagggaacagtcgcgtatgtcgcggatgaaacggaacttccatacgacgaaaatggtatcacaccagatgtcattattaattctacatccatcttctctagaaaaactatatctatgttgatagaagttattttaacagccgcatattctgctaagccgtacaacaataagggagaaaaccgacctgtctgttttcctagtagtaacgaaacatccatcgatacatatatgcaattcgctaaacaatgttatgagcattcaaatccgaaattgtccgatgaagaattatcggataaaatcttttgtgaaaagattctctatgatcctgaaacggataagccttatgcatccaaagtattttttggaccaatttattacttgcgtctgaggcatttaactcaggacaaggcaaccgttagatgtagaggtaaaaagacgaagctcattagacaggcgaatgagggacgaaaacgtggaggaggtatcaagttcggagaaatggagagagactgtttaatagcgcatggtgcagccaatactattacagaagttttgaaagattcggaagaagattatcaagatgtgtatgtttgtgaaaattgtggagacatagcagcacaaatcaagggtattaatacatgtcttagatgttcaaaacttaatctctctcctctcttaacaaaaattgataccacgcacgtatctaaagtatttcttactcaaatgaacgccagaggcgtaaaagtcaaattagatttcgaacgaaggcctccttcgttttataaaccattagataaagttgatctcaagccgtcttttctggtgtaatattctagtttggtagtagatacatatcaatatcatcaaattcgagatccgaattataaaatgggcgtggattgttaactatagaatcggacgtctgatattcgaaaatctgtggagtttcaggttttggtggaggtgtaactgctacttgggatactgaagtctgatattcagaaagctgtggatgttctggttcggcatccaccgatggtgtcacatcactaatcggttcggtaacgtctgtggatggaggtgctacttctacagaacctgtagcctcagttgtcaacggagatacatttttaatgcgagaaaatgtataatttggtaatggtttcttatgtggatctgaagaagaggtaagatatctactagaaagataccgatcacgttctagttctcttttgtagaacttaactttttctttctccgcatctagttgatattccaacctcttcacgttactacgttcagattccaattcacgttcgcatgggttacctccgcagtttttacgagcgatttcacgttcagccttcatgcgtctctccctctctctatcgagtttatcagagcagtctttctgaaggcgatcgaactccataaatttctccaacgctttgattgtttccatagatttccgaagttcagcttttaggactgtgattctttttctttcgaattcacagctggatgtacaaccgtttccattaccgccatctctaagtttcttttctagatcggcaacatttcatccccatgccttttacattcctcgagtctactgtcgtcgaaatatcgttccagctccttttcgacatcaataactttagcacgttgtctctcaagctctcttttgtagttatctgattccctggcacgtttaagatcttcatgcaattgagtcagctcttaacttcctctcttgcttcttcgtcatagtacgcgcaatcactgtgagatccattgttaccacgtctacactcggcgagctcgcgtttaagagattcaatttcccgtttgtattggtccatgtttccattgctaccaccattagatttacaggctgctagttgtcgttcgagatcagaaatacgggttttcttggaattgatttcgtcgatgtacttggcatcgaaacacttattaagttctttttccaattctacgattttatttctttcgcgagtcaattccctcctgtagtaactatctgttttgtcagattcacgctctctacgtagactttcttgcaagttactaatttgttccctagcacgtccgagtttagttttatatgctgaatagagttctgattcatcctttgagcagatctctagcgatcgtttaagattcctaattctagtctttagcctatttacctcctcagaagatgttccgttaccgttgcgtttacactcgttaagctgtctatcaagatccatgattctatctctaagacgttgcatctctctttccatatcagcattgctttcattattacgtctgcagtcactcaactgtctttcaatatctgagattctatctctaagacgtcgcatctctctctgtttcggcattggtttcattattacgtttacagtcgttcaactgtctttcaagatctgatattctagattggagtctgctaatctctgtagcattttcacggcattcactcagttgtctttcaagatctgaaattttagattggagtctgctaatctctgtaagatttcctcctccgctctcgatgcagtcggtcaacttattctctagttctctaatacgcgaacgcagtgcatcaacttcttgcgtgtcttcctggttgcgtgtacattcatcgagatctctaacgcgtcgtcgttcttcctcaagttctctgcgtactacagaaagcgtgtccctatcttgttgatatttagcaatttctgattctagagtactgattttgcttacgtagttactaatagttgtcttggccttatcaagatcctccttgtatttgtcgcattccttgatatccctacgaagtctggacagttcccattcgacattacgacgtttatcgatttcagctcggagatcgtcatcgcgttgttttagccacatacgactgagttcaagttctcgttgacaagatccatctacttttccattcctaatagtatccagttccttttctagttctgaacgcatttctcgttccctatcaagcgattctctcaattctcggatagtcttcttatcaatttctaataaatctgaaccatcatctgtcccattttgaatatccctgtgttctttgatctcttttgtaagtcggtcgattctttcggttttataaacagaatccctttccaaagtcctaatcttactgagtttatcactaagttctgcattcaattcggtgagttttctcttggcttcttccaactctgttttaaactctccactatttccgcattcttcctcgcatttatctaaccattcaattagtttattaataactagttggtaatcagcgattcctatagccgttcttgtaattgtgggaacataattaggatcttctaatggattgtatggcttgatagcatcatctttatcattattagggggatggacaaccttaattggttggtcctcatctcctccagtagcgtgtggttcttcaataccagtgttagtaataggcttaggcaaatgcttgtcgtacgcgggcacttcctcatccatcaagtatttataatcgggttctacttcagaatattcttttctaagagacgcgacttcgggagttagtagaagaactctgtttctgtatctatcaacgctggaatcaatactcaagttaaggatagcgaatacctcatcgtcatcatccgtatcttctgaaacaccatcatatgacatttcatgaagtctaacgtattgataaatagaatcagatttagtattaaacagatccttaacctttttagtaaacgcatatgtatattttagatctccagatttcataatatgatcacatgccttaaatgtcagtgcttccatgatataatctggaacactaatgggtgacgaaaaagatacagcaccatatgctacgttgataaataaatctgaaccactaagtagataatgattaatgttaagaaagaggaaatattcagtgtataggtatgtcttggcgtcatatcttgtactaaacacgctaaacagtttgttaatgtgatcaatttccaatagattaattagagcagcgggaataccaacaaacatattaccacatccgtattttctatgaatatcacatatcatgttaaaaaatcttgatagaagagcgaatatctcgtctgacttaatgagtcgtagttcagcagcaacataagtcataactgtaaatagaacatactttcctgtagtgttgattctagactccacatcaacaccattattaaaaatagttttatatacatctttaatctgctctccgttaatcgtcgaacgttctagtatacggaaacactttgatttcttatctgtagttaatgacttagtgatatcacgaagaatattacgaattacatttcttgtttttcttgagagacctgattcagaactcaactcatcgttccatagtttttctacctcagtggcgaaatctttggagtgcttggtacatttttcaataaggttcgtgacctccatttattataaaaaatttattcaaaacttaactacaatcgggtaattataagatcgtagatctcccatgtggcggaatactaccatctatcgcatgtggatggacagtaggtaatggccatgggaacagtaatgtttgcatatttatctttcttgctagtattactgcatattgtcccaatgtttcgatgtgatgttctaacctatcaactgccgctgtatcacaacaatagtgtccgatgaaattaagattatgatccaatgtgtttaatatatgattatcaagtcttatacgatccgcgtcttttttgacaggatcaggttcttctacaggaagaagtttcggcctcttatgatattcatgtctgggaaacggtggtctagggtgaggctccggtatcggagtgggttttggattataatcatcatcgtctatgacatcatcttcgacttcgatatttattttgctatcttgatgatgtcctgtatcagttgcattttcagcactcgactgaatattagcgcattcattgtctattattaccatatttctaaacccaaaatgtatgtgttgaacatcagtactatcgttgatgagtcttatagcatgaattcgcttatcgttatcgggtttatcttctgtcaccttagcaattccttttttattaaactctacataatcatatccatttctattgtttgttctaatataaacgagtatagcatcattgctaaatttttcaatagtatcaaaaacagaatatcctaaaccatataatatatattcaggaacactcaaactaaatgtccaggattctcctaaatacgtaaactttaatagtgcgaaatcattcaaaaatctaccacttatagatagatagtacataaatgcgtatagtagtctacctatctctttattatgaaaaccggcattacgatcatatatgtcgtgatatacctgtgatccgtttacgttaaaccataaatacatgggtgatcctataaacatgaatttatttctaattctcagagctatagttaattgaccgtgtaatatttgcttacatgcatacttgatacgcttattaataagatttttatcattgctcgttatttcagaatcgtatatataaggagtaccatcgtgattcttaccagatattatacaaaatactatatataaaatatattgacccacgttagtaatcatataaatgtttaacgttttaaattttgtattcaatgatccattatcatacgctatcatggtcttgtaatattcattctttaaaatataatattgtgttagccattgcattggagctcctaatggagattttctattctcatccattttaggataggctttcataaagtccctaataacttcgtgaataatgtttctatgttttctactgatgcatgtatttgcttcgatttttttatcccatgtttcatctatcatagatttaaacgcagtaatgctcgcaacattaacatcttgaaccgttggtacaattccgttccataaatttataatgttcgccatttatataactcattttttgaatatacttttaattaacaaaagagttaagttactcatatggacgccgtccagtctgaacatcaatctttttagccagagatatcatagccgctcttagagtttcagcgtgattttccaacctaaatagaacttcatcgttgcgtttacaacacttttctatttgttcaaactttgttgttacattagtaatctttttttccaaattagttagccgttgtttgagagtttcctcattgtcgtcttcatcggctttaacaattgcttcgcgtttagcctctggctttttagcagcctttgtagaaaaaaattcagttgctggaattgcaagatcgtcatctccggggaaaagagttccgtccatttaaagtacagattttagaaactgacactctgcgttatttatatttggtacaacacatggattataaatattgatgttaataacatcagaaaatgtaaagtctatacattgttgcatcgtgttaaattttctaatggatctagtattattgggtccaacttctgcctgaaatccaaatatggaagcggatacaaaaccgtttcctggataaaccacacatctccacttttgctttacatcagaaattgtgtcgttgacatcttgaactctcctatctaatgccggtgttccacctatagattttgaatattcgaatgctgcatgagtagcattaaattccttaatattgccataattttcatatattgagtaaccctggataaaaagtaaacacaccgcagccgtcgctaccacaataaaaaaaattgatagagagttcatttataatctattagaagctgacaaaatttttttacacgcatcagacaatgctttaataaatagttcaacatctacttttgtcatatcgaaccgatggtatgattctaacctagaattacatccgaaaaagttgactatgttcatagtcattaagtcattaacaaacaacattccagactctggattataagacgatactgtttcgtcacaattacctaccttaatcatgtgattatgaatattggctattagagcaccttctaagaaatctataatatctttgaaacacgatttaaaatcaaaccacgaatatacttctacgaagaaagttagtttacccataggagaaataactataaatggagatctaaatacaaaatccggatctatgatagttttaacattattatattctctattaaatacctccacatctaaaaatgttaattttgaaactatgtcttcgtttattaccgtacctgaactaaacgctataagctctattgtttgagaactctttaaacgatattcttgaaatacatgtaacaaagtttcctttaactcggtcggtttatctaccatagttacagaatttgtatccttatctataatataataatcaaaatcgtataaagttatataattatcgcgttcagattgtgatcttttcaaatagactaaaaaccccatttctctagtaagtatcttatgtatatgtttgtaaaatatcttcatggtgggaatatgctctaccgcagttagccattcctcattgacagcggtagatgtattagacaaaactattccaatgtttaacaagggccattttacgagattattaaatccttgtttgataaatgtagccaatgagggttcgagttcaacgacgattgaattctcttcccgcggatgctgcatgatgaacgacgggatgttgttcgattgatttggaattctttttcgactttttgtttatattaaatattttaaaatttatagcggatagcaattcatgtaccacggataatgtagacgcgtattgcgcatcgatatctttattattagataaatttatcaataaatgtgagaagtttgcctcgttaaggtcttccatttaaatattatataaacatttgtgtttgtatcttattcgtcttttatggaatagttttttactagtaaagctgcaattacacactttgtccgtaaaacataaatataaacaccagcttttatcaatcgttccaaaaagtcgacggcggacatttttaacatggcatctattttaaatacacttaggtttttggaaaaaacatcattttataattgtaacgattcaataactaaagaaaagattaagattaaacataagggaatgtcatttgtattttataagccaaagcattctaccgttgttaaatacttgtctggaggaggtatatatcatgatgatttggttgtattggggaaggtaacaattaataatctaaagatgatgctattttacatggatttatcatatcatggagtgacaagtagtggagcaatttacaaattgggatcgtctatcgatagactttctctaaataggactattgttacaaaagttaataattatgatgatacattttttgacgacgatgattgatcgctattgcacaattttgtttttgtactttctaatatagtgtttaggttctttttcatatgagaatattgatttactaaaatatctatgtttaacttttgttctatgacgtccttatcggcggtatcggtacatatacgtaattcaccttcacaaaatacggagtcttcgataataatagccaatcgattattggatctagctgtctgtatcatattcaacatgtttaatatatcctttcgtttcccctttacaggcatcgatcgtagcatattttccgcgtctgatatggaaatgttaaaactacaaaaatgcgtaatgttagcccgtcctaatattggtacgtgtctataagtttggcatagtagaataatagacgtgtttaaatgccttccaaagtttaagaattctattagagtattgcattttgatagtttatcgcctacatcatcaaaaataagtaaaaagtgtgctgattttttatgattttgtgcgacagcaatacatttttctatgttacttttagttcgtatcagattatattctagagattcctgactactaacgaaattaatatgatttggccaaatgtatccatcataatctgggttataaacgggtgtaaacaagaatatatgtttatattttttaactagtgtagaaaacagagatagtaaatagatagtttttccagatccagatcctcctgttaaaaccattctaaacggcatttttaataaattttctcttgaaaattgtttttcttggaaacaattcataattatatttacagttactaaattaatttgataataaatcaaaatatggaaaactaaggttgttagtagggaggagaacaaagaaggcacatcgtgatataaataacatttattatcatgatgacaccagaaaacgacgaagagcagacatctgtgttctccgctactgtttacggagacaaaattcagggaaagaataaacgcaaacgcgtgattggtctatgtattagaatatctatggttatttcactactatctatgattaccatgtccgcgtttctcatagtgcgcctaaatcaatgcatgtctgctaacgaggctgctattactgacgccgctgttgccgttgctgctgcatcatctactcatagaaaggttgcgtctagcactacacaatatgatcacaaagaaagctgtaatggtttatattaccagggttcttgttatatattacattcagactaccagttattctcggatgctaaagcaaattgcactgcggaatcatcaacactacccaataaatccgatgtcttgactacctggctcattgattatgttgaggatacatggggatctgatggtaatccaattacaaaaactacatccgattatcaagattctgatgtatcacaagaagttagaaagtatttttgtgttaaaacaatgaactaatatttatttttgtacattaataaatgaaatcgcttaatagacaaactgtaagtaggtttaagaagttgtcggtgccggccgctataatgatgatactctcaaccattattagtggcataggaacatttctgcattacaaagaagaactgatgcctagtgcttgcgccaatggatggatacaatacgataaacattgttatttagatactaacattaaaatgtctacagataatgcggtttatcagtgtcgtaaattacgagctagattgcctagacctgatactagacatctgagagtattgtttagtattttttataaagattattgggtaagtttaaaaaagaccaatgataaatggttagatattaataatgataaagatatagatattagtaaattaacaaattttaaacaactaaacagtacgacggatgctgaagcgtgttatatatacaagtctggaaaactggttaaaacagtatgtaaaagtactcaatctgtactatgtgttaaaaaattctacaagtgacaacaaaaaatgaattaataataagtcgttaacgtacgccgccatggacgccgcgtttgttattactccaatgggtgtgttgactataacagatacattgtatgatgatctcgatatctcaatcatggactttataggaccatacattataggtaacataaaaactgtccaaatagatgtacgggatataaaatattccgacatgcaaaaatgctactttagctataagggtaaaatagttcctcaggattctaatgatttggctagattcaacatttatagcatttgtgccgcatacagatcaaaaaataccatcatcatagcatgcgactatgatatcatgttagatatagaagataaacatcagccattttatctattcccatctattgatgtttttaacgctacaatcatagaagcgtataacctgtatacagctggagattatcatctaatcatcaatccttcagataatctgaaaatgaaattgtcgtttaattcttcattctgcatatcagacggcaatggatggatcataattgatgggaaatgcaatagtaattttttatcataaaagttgtaaagtaaataataaaacaataaatattgaactagtagtacgtatattgagcaatcagaaatgatgctggtacctcttatcacggtgaccgtagttgcgggaacaatattagtatgttatatattatatatttgtaggaaaaagatacgtactgtctataatgacaataaaattatcatgacaaaattaaaaaagataaagagttctaattccagcaaatctagtaaatcaactgatagcgaatcagactgggaggatcactgtagtgctatggaacaaaacaatgacgtagataatatttctaggaatgagatattggacgatgatagcttcgctggtagtttaatatgggataacgaatccaatgttatggcgcctagcacagaacacatttacgatagtgttgctggaagcacgctgctaataaataatgatcgtaatgaacagactatttatcagaacactacagtagtaattaatgaaacggagactgttgaagtacttaatgaagataccaaacagaatcctaactattcatccaatcctttcgtaaattataataaaaccagtatttgtagcaagtcaaatccgtttattacagaacttaacaataaatttagtgagaataatccgtttagacgagcacatagcgatgattatcttaataagcaagaacaagatcatgaacacgatgatatagaatcatcggtcgtatcattggtgtgattagtttcctttttataaaattgaagtaatatttagtattattgctgccgtcacgttgtacaaatggagatattccctgtattcggcatttctaaaattagcaattttattgctaataatgactgtagatattatatagatacagaacatcaaaaaattatatctgatgagatcaatagacagatggatgaaacggtacttcttaccaacatcttaagcgtagaagttgtaaatgacaatgagatgtaccatcttattcctcatagattatcgacgattatactctgtattagttctgtcggaggatgtgttatctctatagataatgacatcaatggcaaaaatattctaacctttcccattgatcatgctgtaatcatatccccactgagtaaatgtgtcgtagttagcaagggtcctacaaccatattggttgttaaagcggatatacctagcaaacgattggtaacatcgtttacaaacgacatactatatgtaaacaatctgtcactgattaattatttgccgttgtctgtattcattattagacgagtcaccgactatttggatagacacatatgcgatcagatatttgctaataataagtggtattcccttataaccatcgacgataagcaatatcctattccatcaaactgtataggtatgtcctctgccaagtacataaattctagcatcgagcaagatactttaatccatgtttgtaacctcgagcatccgttcgactcagtatacaaaaaaatgcagtcgtacaattctctacctatcaaggaacaaatattgtacggtagaattgataatataaatatgagcattagtatttctgtggattaatagatttctagtatggggatcattaatcatctctaatctctaaatacctcataaaacgaaaaaaaagctattatcaaatactgtacggaatggattcattctcttctctttttatgaaactctgttgtatatctactgataaaactggaagcaaaaaatctgatagaaagaataagaataagatcaaggattatatggaacacgattattataaaataacaatagttcctggttcctcttccacgtctactagctcgtggtattatacacatgcctagtaatagtctctttgcgttgacggaaagcagactagaaataacaggctaaaatgttcagacaccataatagttcccaacccagataataacagagttccatcaacacattcctttaaactcaatcccaaacccaaaaccgttaaaatgtatccggccaattgatagtagataatgaggtgtacagcgcatgataatttacacagtaaccaaaatgaaaatactttagtaattataagaaatatagacggtaatgtcatcatcaacaatccgataatatgcctgagagtaaacattgacggataaaacaaaaatgctccgcataactctatcatggcaataacacaaccaaatacttgtaagattcctaaattagtagaaaatacaacgaatatcgatgtataagtgatctcgagaaataataagaataaagtaatgcccgtaaagataaacatcaacattgtttggtaatcattaaaccaattagtatgaagttgaactaatttcacagtagattttattccagtgttatcctcgcatgtataagtacctggtaagatatctttatattccataatcaatgagacatcactatctgataacgaatgaagtctagcactagtatgccatttacttaatattgtcgtcttggaagttttattataagttaaaatatcatggttatccaatttccatctaatatactttgtcggattatctatagtacacggaataatgatggtatcattacatgctgtatactctatggtctttgtagttgttataacaaccaacgtatagaggtatatcaacgatattctaactcttgacattttttatttatttaaaatgatacctttgttatttattttattctattttgctaacggtattgaatggcataagtttgaaacgagtgaagaaataatttctacttacttattagacgacgtattatacacgggtgttaatggggcggtatacacattttcaaataataaactaaacaaaactggtttaactaataataattatataacaacatctataaaagtagaggatgcggataaggatacattagtatgcggaaccaataacggaaatcccaaatgttggaaaatagacggttcagacgacccaaaacatagaggtagaggatacgctccttatcaaaatagcaaagtaacgataatcagtcacaacggatgtgtactatctgacataaacatatcaaaagaaggaattaaacgatggagaagatttgacggaccatgtggttatgatttattcacggcggataacgtaattccaaaagatggtttacgaggagcattcgtcgataaagacggtacttatgacaaagtttacattcttttcactgatactatcggctcaaagagaattgtcaaaattccgtatatagcacaaatgtgcctaaacgacgaaggtggtccatcatcattgtctagtcatagatggtcgacgtttctcaaagtcgaattagaatgtgatatcgacggaagaagttatagacaaattattcattctagaactataaaaacagataatgatacgatactatatgtattcttcgatagtccttattccaagtccgcattatgtacctattctatgaataccattaaacaatctttttctacgtcaaaattggaaggatatacaaagcaattgccgtctccagctcctggtatatgtttaccagctggaaaagttgttccacataccacgtttgaagtcatagaacaatataatgtactagatgatattataaagcctttatctaaccaacctatcttcgaaggaccgtctggtgttaaatggttcgatataaaggagaaggaaaatgaacatcgggaatatagaatatacttcataaaagaaaattctatatattcgttcgatacaaaatctaaacaaactcgtagctcgcaagtcgatgcgcgactattttcagtaatggtaactgcgaaaccgttatttatagcagatatagggataggagtaggaatgccacaaatgaaaaaaatacttaaaatgtaatcttaatcgagtacaccacacgacaatgaacaaacataagacagattatgctggttatgcttgctgcgtaatatgcggtctaattgtcggaattatttttacagcgacactattaaaagttgtagaacgtaaattagttcatacaccattaatagataaaacgataaaagatgcatatattagagaagattgtcctactgactggataagctataataataaatgtatccatttatctactgatcgaaaaacctgggaggaaggacgtaatgcatgcaaagctctaaattcaaattcggatctaattaagatagagactccaaacgagttaagttttttaagaagccttagacgaggctattgggtaggagaatccgaaatattaaaccagacaaccccatataattttatagctaagaatgccacgaagaatggaactaaaaaacggaaatatatttgtagcacaacgaatactcccaaactgcattcgtgttacactatataacaattacactacatttttatcataccactacttcggttagatgttttagaaaaaaataaatatcgccgtaccgttcttgtttttataaaaataacaattaacaattatcaaattttttctttaatattttacgtggttgaccattcttggtggtaaaataatctcttagtgttggaatggaatgctgtttaatgtttccacactcatcgtatattttgacgtatgtagtcacatcgtttacgcaatagtcagactgtagttctatcatgcttcctacatcagaaggaggaacagttttaaagtctcttggttttaatctattaccgttagttttcatgaaatcctttgttttatccacttcacattttaaataaatgtccactatacattcttttgttaattttactagatcgtcatgggtcatagaatttataggttccgtagtccatggatccaaactagcaaacttcgcgtatacggtatcgcgattagtgtatacaccaactgtatgaaaattaagaaaacagtttaataaatcaacagaaatatttaatcctccgtttgatacagatgcgccatatttatggatttcggattcacacgttgtttgtctgaggtgttcgtctagtgttgcttctacgtaaacttcgattcccatatattctttattgtcagaatcgcataccgatttatcatcatacactgtttgaaaactaaatggtatacacatcaaaataataaataataacgagtacattctgcaatattgttatcgtaattggaaaaatagtgttcgagtgagttggattatgtgagtattggattgtatattttattttatattttgtaataagaataaaatgctaatgtcaagtttattccaatagatgtcttattaaaaacatatataataaataacaatggctgaatggcataaaattatcgaggatatctcaaaaaataataagttcgaggatgccgccatcgttgattacaagactacaaagaatgttctagctgctattcctaacagaacatttgccaagattaatccgggtgaaattattcctctcatcactaatcgtaatattctaaaacctcttattggtcagaaatattgtattgtatatactaactctctaatggatgagaacacgtatgctatggagttgcttactgggtacgcccctgtatctccgatcgttatagcgagaactcataccgcacttatatttttgatgggtaagccaacaacatccagacgtgacgtgtatagaacgtgtagagatcacgctacccgtgtacgtgcaactggtaattaaaataaaaagtaatattcatatgtagtgtcaattttaaatgatgatgatgaaatggataatatccatattgacgatgtcaataatgccggtattggcatacagttcatcgatttttagatttcattcagaggatgtggaattatgttatgggcatttgtattttgataggatctataatgtagtaaatataaaatataatccgcatattccatatagatataattttattaatcgcacgttaaccgtagatgaactagacgataatgtcttttttacacatggttattttttaaaacacaaatatggttcacttaatcctagtttgattgtctcattatcaggaaacttaaaatataatgatatacaatgctcagtaaatgtatcgtgtctcattaaaaatttggcaacgagtacatctactatattaacatctaaacataagacttattctctacatcggtccacgtgtattactataataggatacgattctattatatggtataaagatataaatgacaagtataatgacatctatgattttactgcaatatgtatgctaatagcgtctacattgatagtgaccatatacgtgtttaaaaaaataaaaatgaactcttaattatgctatgctattagaaatggataaaatcaaaattacggttgattcaaaaattggtaatgttgttaccatatcgtataacttggaaaagataactattgatgtcacacctaaaaagaaaaaagaaaaggatgtattattagcgcaatcagttgctgtcgaagaggcaaaagatgtcaaggtagaagaaaaaaatattatcgatattgaagatgacgatgatatggatgtagaaagcgcgtaatacgatctataaaaataagtatataaatactttttatttactgtactcttactgtgtagtggtgataccctactcgattatttttttaaaaaaaaaatacttattctgattcttctagccatttccgtgttcgtttgaatgccacatcgacgtcaaagataggggagtagttgaaatctagttctgcattgttggtacgcacctcaaatgtagtgttggatatcttcaacgtatagttgttgagtagtgatggttttctaaatagaattctcttcatatcattcttgcacgcgtacatttttagcatccatcttggaatcctagatccttgttctattcccaatggtttcatcaatagaagattaaacatatcgtacgaacacgatggagagtaatcgtagcaaaagtaagcatttcctttaatcttagatcccggatactggatatattttgcagccaacacgtgcatccatgcagcatttcctacatatacccggctatgcaccgcgtcatcatcgactgtacgatacataatgttaccgtgttgcttacattgctcgtaaaagactttcatcaatttgtctccttctccgtaaattccagtgggtcttaggcaacaagtatacaattttgctccattcatgattacggaattattggctttcataaccagttgctcggccatacgtttactttttgcgtatacatgtcctggtgatatatcataaagggtatgctcatggccgatgaatggatcaccgtgtttattgggtcctattgcttccatgctactagtatagatcaaatacttgattcctaggtccacacaagctgccaaaatagtctgtgttccataatagtttactttcatgatttcattatcggtgtattttccaaatacatccactagagcagccgtatgaataatcagatttaccccatctagcgcttctctcaccttatcaaagtcgtttatatcacattgtatatagtttataaccttaactttcgaggttattggttgtggatcttctacaatatctatgactctgatttcttgaacatcatctgcactaattaacagttttactatatacctgcctagaaatccggcaccaccagtaaccgcgtacacggccattgctgccactcataatatcagactacttattctattttactaaataatggctgtttgtataatagaccacgataatatcagaggagttatttactttgaaccagtccatggaaaagataaagttttaggatcagttattggattaaaatccggaacgtatagtttgataattcatcgttacggagatattagtcaaggatgtgattccataggcagtccagaaatatttatcggtaacatctttgtaaacagatatggtgtagcatatgtttatttagatacagatgtaaatatatttacaattattggaaaggcgttatctatttcaaaaaatgatcagagattagcgtgtggagttattggtatttcttacataaatgaaaagataatacattttcttacaattaacgagaatggcgtttgatatatcagttaatgcgtctaaaacaataaatgcattagtttacttttctactcagcaaaataaattagtcatacgtaatgaagttaatgatacacactacactgtcgaatttgatagggacaaagtagttgacacgtttatttcatataatagacataatgacaccatagagataagaggggtgcttccagaggaaactaatattggttgcgcggttagtatgacttacttgtataataagtatagttttaaactgattttagcagaatatataagacacagaaatactatatccggcaatatttattcggcattgatgacactagatgatttggctattaaacagtatggagacattgatctattatttaatgagaaacttaaagtagactccgattcgggactatttgactttgtcaactttgtaaaggatatgatatgttgtgattctagaatagtagtagctctatctagtctagtatctaaacattgggaattgacaaataaaaaatataggtgtatggcattagccgaacatatatctgatagtattccaatatctgagctatctagactacgatacaatctatgtaagtatctacgcggacacactgagagcatagaggataaatttgattattttgaagacgatgattcgtctacatgttctgccgtaaccgacagggaaacggatgtataattttttttatagcgtgaaggatatgataaaaaatataattgttgtatttatcccattccaatcaccttatatgattctgtaacacaataaaggagtcttatagatgtatagaggtcagatactggtttgataaactgtttattccacataagtatgtttgactttatggttagacccgcatactttaacaaatcactgaaaattggagttaggtattgacctctcagaatcagttgccgttctggaacattaaatgtattttttatgatatactccaacgcatttatgtgggcatacaacaagtcattactaatggaatattccaagagttttagttgtctagtatttaacaagagaagagatttcaacagactgtttatgaactcgaatgccgcctcattgtcgcttatattgatgatgtcgaattctcccaatatcatcaccgatgagtagctcatcttgttatcgggatccaagttttctaaagatgtcattaaaccctcgatcatgaatggatttatcatcatcgtttttatgttggacatgagcttagtccgtttgtccacatctatagaagatgatttctgaattatttcatatatctctctctttaactccaggaacttgtcaggatggtctactttaatatgttctcgtctaagagatgaaaatctttggatggttgcacgcgacttttctctaaaggatgacgttgcccaagatcctctcttaaatgaatccatcttatccttggacaagatggacagtctattttccttagatggtttaatatttttgttacccatgatctataaaggtagacctaatcgtctcggatgaccatatatttattttcagttttattatacgcataaattgtaaaaaatatgttaggtttacgaaaatgtctcgtggggcattaatcgtttttgaaggattggacaaatctggaaaaacaacacaatgtatgaacatcatggaatcaataccttcaaacacaataaaataccttaactttcctcagagatccactgtcactggaaagatgatagatgactatctaactcgtaaaaaaacctataatgatcatatagttaatctattattttgtgcaaatagatgggagtttgcatcttttatacaagaacaactagaacagggaattactttaatagttgatagatacgcattttctggagtagcgtatgccgccgctaaaggcgcgtcaatgactctcagtaagagttatgaatctggattgcctaaacccgacttagttatattcttggaatctggtagcaaagaaattaatagaaacgtcggtgaggaaatttatgaagatgttacattccaacaaaaggtattacaagaatataaaaaaatgattgaagaaggagatattcattggcaaattatttcttctgaattcgaggaagatgtaaagaaggagttgattaagaatatagttatagaggctatacacacggttactggaccagtggggcaactgtggatgtaatagtgaaattacattttttataaatagatgttagtacagtgttataaatggatgaagcatattactctggcaacttggaatcagtactcggatacgtgtccgatatgcataccgaactcgcatcaatatctcaattagttattgccaagatagaaactatagataatgatatattaaacaaggacattgtaaattttatcatgtgtagatcaaacttggataatccatttatctctttcctagatactgtatatactattatagatcaagagaactatcagactgagttgattaattcattagacgacaatgaaattatcgattgtatagttaataagtttatgagcttttataaggataacctagaaaatatagtagatgctatcattactctaaaatatataatgaataatccagattttaaaactacgtatgccgaagtactcggttccagaatagccgatatagatattaaacaagtgatacgtaagaatatactacaattgtctaataatatccgcgaacgatatttgtgaaaatattaaaaaaaaatactttttttattaaatgacgtcttttcgtgaatttagaaaattatgctgtgctatatatcacgcatcaggatataaagaaaaatctaaattaattagagactttataacagatagggatgataaatatttgatcattaagctattgcttcccggattagacgatagaatttataacatgaacgataaacaaattataaaattatatagtataatatttaaacaatctcaggaagatatgctacaagatttaggatacggatatataggagacactattaggactttcttcaaagagaacacagaaatccgtccacgagataaaagcattttaactttagaagaagtggatagttttttaactacgttatcatccgtaactaaagaatcgcatcaaataaaattattgactgatgtagcatctgtttgtacatgtaatgatttaaaatgtgtagtcatgcttattgataaagatctaaaaattaaagcgggtcctcggtacgtacttaacgctattagtcctaatgcctatgatgtgtttagaaaatctaataacttgaaagagataatagaaaattcatctaaacaaaatctagactctatatctatttctgttatgactccaattaatcccatgttagcggaatcgtgtgattctgtcaataaggcgtttaaaaaatttccatcaggaatgtttgcggaagtcaaatacgatggtgaaagagtacaagttcataaaaataataacgagtttgccttctttagtagaaacatgaaaccagtactctctcataaagtggattatctcaaagaatacataccgaaagcatttaaaaaagctacgtctatcgtattggattctgaaattgttcttgtagacgaacataatgtaccgctcccgtttggaagtttaggtatacacaaaaagaaagaatataaaaactctaacatgtgtttgttcgtgtttgactgtttgtactttgatggattcgatatgacggacattccattgtacgaacgaagatcttttctcaaagatgttatggttgaaatacccaatagaatagtattctcagagttgacgaatattagtaacgagtctcagttaactgacgtattggatgatgcactaacgagaaaattagaaggattggtcttaaaagatattaatggagtatacgaaccgggaaagagaagatggttaaaaataaagcgagactatttgaacgagggttccatggcagattctgccgatttagtagtactaggtgcctactatggtaaaggagcaaagggtggtatcatggcagtctttctaatgggttgttacgacgatgaatccggtaaatggaagacggttaccaagtgttcaggacacgatgataatacgttaagggagttgcaagaccaattaaagatgattaaaattaacaaggatcccaaaaaaattccagagtggttagtagttaataaaatctatattcccgattttgtagtagaggatccgaaacaatctcagatatgggaaatttcaggagcagagtttacatcttccaagtcccataccgcaaatggaatatccattagatttcctagatttactaggataagagaggataaaacgtggaaagaatctactcatctaaacgatttagtaaacttgactaaatcttaatagttacatacaaactgaaaattaaaataacactatttagttggtggtcgccatggatggtgttattgtatactgtctaaacgcgctagtaaaacatggcgaggaaataaatcatataaaaaatgatttcatgattaaaccatgttgtgaaagagtttgtgaaaaagtcaagaacgttcacattggcggacaatctaaaaacaatacagtgattgcagatttgccatatatggataatgcggtatccgatgtatgcaattcactgtataaaaagaatgtatcaagaatatccagatttgctaatttgataaagatagatgacgatgacaagactcctactggtgtatataattattttaaacctaaagatgccattcctgttatcatatctataggaaaggataaagatgtctgtgaactattaatctcatcagacatatcgtgtgcatgcgtggagttaaattcatatcacgtagccattcttcccatggatgtttccttttttaccaaaggaaatgcatcattgattattctcctgtttgatttctctatcgatgcggcacctctcttaagaagtgtaaccgataataatgttattatatctagacaccagcgtctacatgacgagcttccgagttccaattggttcaagttttacataagtataaagtccgactattgttctatattatatatggttgttgatggatctgtgatgcatgcgatagctgataatagaactcacgcaattattagcaaaaatatattagacaatactacgattaacgatgagtgtagatgctgttattttgaaccacagattaggattcttgatagagatgagatgctcaatggatcatcgtgtgatatgaacagacattgtattatgatgaatttacctgatgtaggcgaatttggatctagtatgttggggaaatatgaacctgacatgattaagattgctctttcggtggctggtaatttaataagaaatcgagactacattcccgggagacgaggatatagctactacgtttacggtatagcctctagataatttttttaagcacgaaataaaaaacataattttaaaccaatctatttcatactattttgtgtgatcaccatggacataaagatagatattagtatttctggtgataaatttacggtgactactaggagggaaaatgaagaaagaaaaaaatatctacctctccaaaaagaaaaaactactgatgttatcaaacctgattatcttgagtacgatgacttgttagatagagatgagatgtttactattctagaggaatattttatgtacagaggtctattaggcctcagaataaaatatggacgactctttaacgaaattaaaaaattcgacaatgatgcggaagaacaattcggtactatagaagaactcaagcagaaacttagattaaattctgaagagggagcagataactttatagattatataaaggtacaaaaacaggatatcgtcaaacttactgtatacgattgcatatctatgataggattgtgtgcatgcgtggtagatgtttggagaaatgagaaactgttttctagatggaaatattgtttacgagcgattaaactgtttattgatgatcacatgcttgataagataaaatctatactgcagaatagactagtatatgtggaaatgtcatagaaagttaaaagttaatgagagcaaaaatatataaggttgtattccatatttgttatttttttctgtaatagttagaaaaatacattcgatggtctatctatcagattattatgtgttataaggtactttttctcataataaactagagtatgagtaagatagtgtttttcaaaacatataaatctaaaattgatggatgagatatacagctattaatttcgaaaatatattttaatctgataactttaaacatggatttttaatggtggtttaacgttttaaaaaaagattttgttattgtagtatatgataatattaaaagatggatataaagaatttgctgactgcatgtactattttttacattactacattggctacggcagatatacctacttcgtcactgccacacgctccggtaaacggggcatgtgacgagggagaatatcttgataagaggcataatcaatgttgtaatcagtgtccacctggagaatttgccaaggttagatgtaatggtaacgataacacaaaatgtgaacgctgcccacctcatacatataccgcaatccccaattactctaatggatgtcatcaatgtagaaaatgcccaacaggatcatttgataaggtaaagtgtaccggaacacagaacagtaaatgttcgtgtcttcctggttggtattgcgctactgattcttcacagactgaagattgtcgagattgtataccaaaaaggagatgtccatgcggatactttggtggaatagatgaacaaggaaatcctatttgtaaatcgtgttgtgttggtgaatattgcgactacctacgtaattatagacttgatccatttcctccatgcaaactatctaaatgtaattaattatgattttgatgataatgttaccatacattatatcgctacttggttagtgtattattcagtatgaagacctattaataattacttatcttttgacgatcttgttataattataatataaaaatacttatggcatagtaactcataattgctgacgcgataaattcgtaataatctgttttgttcaaatttttataaggaatctacaggcataaaaataaaaatataatttataatatactcttacagcgcgccatcatgaataacagcagtgaattgattgctgttattaatggatttagaaatagtggacgattttgtgatattaatatagttattaatgatgaaaggataaacgctcacagactcatcctatctggagcctccgaatatttttccattctgttttccaataattttatcgattctaatgaatacgaagttaatctaagtcatttagattatcaaagtgttaacgatttgatcgattacatttatgggatacctttgagcctaactaacgataacgtgaaatatattctttcaaccgctgattttttacaaattggatctgctattacggagtgtgaaaattacatacttaaaaatctttgttctagaaactgtatcgatttctacatatacgctgataaatataataacaagaaaatagaatcagcgtcgtttaacacaatattacaaaatattttgagactcatcaacgatgaaaactttaaatacttaacagaggaatcaatgataaaaattttaagcgatgatatgttaaatataaaaaatgaggatttcgccccactaattctcattaaatggttagagagtactcaacaaccatgcaccgtcgagttacttaaatgcctcagaatatcattgctttccccacaagttataaaatcactttatagtcatcgactggttagttcaatctacgaatgtataacattcttaaacaatatagcattcttggatgaatcatttcctagataccatagcatcgagttgatatctatcggtataagtaattcgcatgataagatttccataaactgctacaatcataaaaaaaatacatgggaaatgatatcttcacgtagatataggtgtagtttcgcagtggccgtcctggataatattatctatatgatgggtggatatgatcagtccccgtatagaagttcaaaggttatagcgtacaatacatgtacaaattcttggatatatgatataccagagctaaaatatcctcgttctaattgtgggggactggctgatgacgaatacatttattgtataggcggcatacgcgatcaggattcatcgttgacatctagtattgatagatggaagccatcaaaaccatattggcagaagtatgctaaaatgcgcgaaccaaaatgtgatatgggggttgcgatgttaaacggattaatatatgttataggtggaatcgttaaaggtgacacgtgtaccgacgcactagagagtttatcagaagatggatggatgaagcatcaacgtcttccaataaaaatgtccaatatgtcgacgattgttcatgatggcaagatttatatatctggaggttacaacaatagtagtgtagttaatgtaatatcgaatctagtccttagctataattcgatatatgatgaatggaccaaattatcatcattaaacattcctagaattaatcccgctctatggtcagcgcataataaattatatgtaggaggaggaatatctgatgatgttcgaactaatacatctgagacatacgacaaagaaaaagattgttggacattggataatggtcacgtgttaccacgcaattatataatgtataaatgcgaaccgattaaacataaatatccattggaaaaaacacagtacacgaatgattttctaaagtatttggaaagttttataggtagttgatagaacaaaatacataattttgtaaaaataaatcactttttatactaatatgacacgattaccaatacttttgttactaatatcattagtatacgctacaccttttcctcagacatctaaaaaaataggtgatgatgcaactctatcatgtaatcgaaataatacaaatgactacgttgttatgagtgcttggtataaggagcccaattccattattcttttagctgctaaaagcgacgtcttgtattttgataattataccaaggataaaatatcttacgactctccatacgatgatctagttacaactatcacaattaaatcattgactgctagagatgccggtacttatgtatgtgcattctttatgacatcaactacaaatgacactgataaagtagattatgaagaatactccacagagttgattgtaaatacagatagtgaatcgactatagacataatactatctggatctacacattcaccggaaactagttctaagaaacctgattatatagataattctaattgctcgtcggtattcgaaatcggtacccggggatcagcttgcatgcctgcagcaattcccgaggctgtagccgacgatggtgcgccaggagagttgttgattcattgtttgcctccctgctgcggtttttcaccgaagttcatgccagtccagcgtttttgcagcagaaaagccgccgacttcggtttgcggtcgcgagtgaagatccctttcttgttaccgccaacgcgcaatatgccttgcgaggtcgcaaaatcggcgaaattccatacctgttcaccgacgacggcgctgacgcgatcaaagacgcggtgatacatatccagccatgcacactgatactcttcactccacatgtcggtgtacattgagtgcagcccggctaacgtatccacgccgtattcggtgatgataatcggctgatgcagtttctcctgccaggccagaagttctttttccagtaccttctctgccgtttccaaatcgccgctttggacataccatccgtaataacggttcaggcacagcacatcaaagagatcgctgatggtatcggtgtgagcgtcgcagaacattacattgacgcaggtgatcggacgcgtcgggtcgagtttacgcgttgcttccgccagtggcgcgaaatattcccgtgcaccttgcggacgggtatccggttcgttggcaatactccacatcaccacgcttgggtggtttttgtcacgcgctatcagctctttaatcgcctgtaagtgcgcttgctgagtttccccgttgactgcctcttcgctgtacagttctttcggcttgttgcccgcttcgaaaccaatgcctaaagagaggttaaagccgacagcagcagtttcatcaatcaccacgatgccatgttcatctgcccagtcgagcatctcttcagcgtaagggtaatgcgaggtacggtaggagttggccccaatccagtccattaatgcgtggtcgtgcaccatcagcacgttatcgaatcctttgccacgcaagtccgcatcttcatgacgaccaaagccagtaaagtagaacggtttgtggttaatcaggaactgttcgcccttcactgccactgaccggatgccgacgcgaagcgggtagatatcacactctgtctggcttttggctgtgacgcacagttcatagagataaccttcacccggttgccagaggtgcggattcaccacttgcaaagtcccgctagtgccttgtccagttgcaaccacctgttgatccgcatcacgcagttcaacgctgacatcaccattggccaccacctgccagtcaacagacgcgtggttacagtcttgcgcgacatgcgtcaccacggtgatatcgtccacccaggtgttcggcgtggtgtagagcattacgctgcgatggattccggcatagttaaagaaatcatggaagtaagactgctttttcttgccgttttcgtcggtaatcaccattcccggcgggatagtctgccagttcagttcgttgttcacacaaacggtgatacgtacacttttcccggcaataacatacggcgtgacatcggcttcaaatggcgtatagccgccctgatgctccatcacttcctgattattgacccacactttgccgtaatgagtgaccgcatcgaaacgcagcacgatacgctggcctgcccaacctttcggtataaagacttcgcgctgataccagacgttgcccgcataattacgaatatctgcatcggcgaactgatcgttaaaactgcctggcacagcaattgcccggctttcttgtaacgcgctttcccaccaacgctgatcaattccacagttttcgcgatccagactgaatgcccacaggccgtcgagttttttgatttcacgggttggggtttctacaggacgtaacattctagtcgaggaattcatttatagcatagaaaaaaacaaaatgaaattctactatatttttacatacatatattctaaatatgaaagtggtgattgtgactagcgtagcatcgcttctagacatctatatactatatagtaataccaatactcaagactacgaaactgatacaatctcttatcatgtgggtaatgttctcgatgtcgatagccatatgcccggtagttgcgatatacataaactgatcactaattccaaacccacccgctttttatagtaagtttttcacccataaataataaatacaataattaatttctcgtaaaagtagaaaatatattctaatttattgcacggtaaggaagtagaatcataaagaacagtgacggatccccgatccccgacctgcaggcatgcaagctcgactccggaaccaattactgataatgtagaagatcatacagacaccgtcacatacactagtgatagcattaatacagtaagtgcatcatctggagaatccacaacagacgagactccggaaccaattactgataaagaagatcatacagttacagacactgtctcatacactacagtaagtacatcatctggaattgtcactactaaatcaaccaccgatgatgcggatctttatgatacgtacaatgataatgatacagtaccaccaactactgtaggcggtagtacaacctctattagcaattataaaaccaaggactttgtagaaatatttggtattaccgcattaattatattgtcggccgtggcaattttctgtattacatattatatatataataaacgttcacgtaaatacaaaacagagaacaaagtctagatttttgacttacataaatgtctgggatagtaaaatctatcatattgagcggaccatctggtttaggaaagacagccatagccaaaagactatgggaatatatttggatttgtggtgtcccataccactagatttcctcgtcctatggaacgagaaggtgttgattaccattacgttaacagagaggccatctggaagggaatagccgccggaaactttctagaacatactgagtttttaggaaatatttacggaacttctaaaacagctgtgaatacagcggctattaataatcgtatttgtgtgatggatctaaacatcgacggtgttagaagtcttaaaaatacgtacctaatgccttactcggtgtatataagacctacctctcttaaaatggttgagaccaagcttcgtcgtagaaacactgaagctaacgatgagattcatcgtcgtgtgatgttggcaaaaactgacatggatgaggcaggtgaagccggtctattcgacactattatcattgaagatgatgtgaatttagcatatagtaagttaattcagatactacaggaccgtattagaatgtattttaacactaattagagacttaagacttaaaacttgataattaataatataactcgtttttatatgtgtctatttcaacgtctaatgtattagttaaatattaaaacttaccacgtaaaacttaaaatttaaaatgatatttcattgacagatagatcacacattatgaactttcaaggacttgtgttaactgacaattgcaaaaatcaatgggtcgttggaccattaataggaaaaggtggattcggtagtatttatactactaatgacaataattatgtagtaaaaatagagcccaaagctaacggatcattatttaccgaacaggcattttatactagagtacttaaaccatccgttatcgaagaatggaaaaaatctcacaatataaagcacgtaggtcttatcacgtgcaaggcatttggtctatacaaatccattaatgtggaatatcgattcttggtaattaatagattaggtgcagatctagatgcggtgatcagagccaataataatagactaccaaaaaggtcggtgatgttgatcggaatcgaaatcttaaataccatacaatttatgcacgagcaaggatattctcacggagatattaaagcgagtaatatagtcttagatcaaatagataagaataaattatatctagtggattacggattggtttctaaattcatgtctaatggcgaacatgttccatttataagaaatccaaataaaatggataacggtactctagaatttacacctatagattcgcataaaggatacgttgtatctagacgtggagatctagaaacacttggatattgtatgattagatggttgggaggtatcttaccatggactaagatatctgaaacaaagaattgtgcattagtaagtgccacaaaacagaaatatgttaacaatactgcgactttgttaatgaccagtttgcaatatgcacctagagaattgctgcaatatattaccatggtaaactctttgacatattttgaggaacccaattacgacaagtttcggcacatattaatgcagggtgtatattattaagtgtggtgtttggtcgataaaaattaaaaaataacttaatttattattgatctcgtgtgtacaaccgaaatcatggcgatgttttacgcacacgctctcggtgggtacgacgagaatcttcatgcctttcctggaatatcatcgactgttgccaatgatgtcaggaaatattctgttgtgtcagtttataataacaagtatgacattgtaaaagacaaatatatgtggtgttacagtcaggtgaacaagagatatattggagcactgctgcctatgtttgagtgcaatgaatatctacaaattggaaatccgatccatgatcaagaaggaaatcaaatctctatcatcacatatcgccacaaaaactactatgctctaagcggaatcgggtacgagagtctagacttgtgtttggaaggagtagggattcatcatcacgtacttgaaacaggaaacgctgtatatggaaaagttcaacatgattattctactatcaaagagaaggccaaagaaatgagtgcacttagtccaggacctatcatcgattaccacgtctggataggagattgtatctgtcaagttactgctgtggacgtacatggaaaggaaattatgaaaatgagattcaaaaagggtgcggtgcttccgatcccaaatctggtaaaagttaaacttggggagaatgatacagaaaatctttcttctactatatcggcggcaccatcgaggtaaccacctctctggaagacagcgtgaatcatgtactcatgaaacgtttggaaactatacgccatatgtggtctgttgtatatgatcattttgatattgtgaatggtaaagaatgctgttatgtgcatacgcattcatctaatcaaaatcctataccgagtactgtaaaaacaaatttgtacatgaagactatgggatcatgcattcaaatggattccatggaagctctagagtatcttagcgaactgaaggaatcaggtggatggagtcccagaccagaaatgcaggaatttgaatatccagatggagtggaagacactgaatcaattgagagattggcagaggagttcttcaatagatcagaacttcaggctggtgaatcagtcaaatttggtaattctattaattgttaaacatacatctgtttcagctaagcaactaagaacacgtatacggcagcagcttccttctatactctcatcttttaccaacacaaagggtggatatttgttcattggagttgataataatacacacaaagtatttggattcacggtgggttacgactacctcagactgatagagaatgatatagaaaagcatatcaaaagacttcgtgttgtgcatttctgtgagaagaaagaggacatcaagtacgcgtgtcgattcatcaaggtatataaacctggggatgagactacctcgacatacgtgtgcgctatcaaagtggaaagatgctgttgtgctgtgtttgcagattggccagaatcatggtatatggatactaatggtatcaagaagtattctccagatgaatgggtgtcacatataaaattttaattaatgtaactatagagaacaaataataaggttgtaatatcatatagacaataactaacaattaattagtaactgttatctcttttttaactaaccaactaactatatacctattaatacatcgtaattatagttcttaacatctattaatcattaattcgcttctttaattttttataaactaacattgttaattgaaaagggataacatgttacagaatataaattatatatggatttttttaaaaaggaaatacttgactggagtatatatttatctcttcattatatagcacgcgtgttttccaatttttccacatcccatataatacaggattataatctcgttcgaacatacgagaaagtggataaaacaatagttgattttttatctaggttgccaaatttattccatattttagaatatggggaaaatattctacatatttattctatggatgatgctaatacgaatattataattttttttctagatagagtattaaatattaataagaacgggtcatttatacacaatctcgggttatcatcatccattaatataaaagaatatgtatatcaattagttaataatgatcatccagataataggataagactaatgcttgaaaatggacgtagaacaagacattttttgtcctatatatcagatacagttaatatctatatatgtattttaataaatcatggattttatatagatgccgaagacagttacggttgtacattattacatagatgtatatatcactataagaaatcagaatcagaatcatacaatgaattaattaagatattgttaaataatggatcagatgtagataaaaaagatacgtacggaaacacaccttttatcctattatgtaaacacgatatcaacaacgtggaattgtttgagatatgtttagagaatgctaatatagactctgtagactttaatagatatacacctcttcattatgtctcatgtcgtaataaatatgattttgtaaagttattaatttctaaaggagcaaatgttaatgcgcgtaataaattcggaactactccattttattgtggaattatacacggtatctcgcttataaaactatatttggaatcagacacagagttagaaatagataatgaacatatagttcgtcatttaataatttttgatgctgttgaatctttagattatctattatccagaggagttattgatattaactatcgtactatatacaacgaaacatctatttacgacgctgtcagttataatgcgtataatacgttggtctatctattaaacaaaaatggtgattttgagacgattactactagtggatgtacatgtatttcggaagcagtcgcaaacaacaacaaaataataatggaagtactattgtctaaacgaccatctttgaaaattatgatacagtctatgatagcaattactaaacataaacagcataatgcagatttattgaaaatgtgtataaaatatactgcgtgtatgaccgattatgatactcttatagatgtacagtcgctacagcaatataaatggtatattttaagatgtttcgatgaaatagatatcatgaagagatgttatataaaaaataaaactgtattccaattagttttttgtatcaaagacattaatactttaatgagatacggtaaacatccttctttcgtgaaatgcactagtctcgacgtatacggaagtcgtgtacgtaatatcatagcatctattagatatcgtcagagattaattagtctattatccaagaagctggatcctggagataaatggtcgtgttttcctaacgaaataaaatataaaatattggaaaactttaacgataacgaactatccacatatctaaaaatcttataaacattattaaaatataaaatctaagtaggataaaatcacactacatcattgtttccttttagtgctcgacagtgtatactatttttaacgctcataaataaaaatgaaaacgatttccgttgttacgttgttatgcgtactacctgctgttgtttattcaacatgtactgtacccactatgaataacgctaaattaacgtctaccgaaacatcgtttaatgataaccagaaagttacgtttacatgtgatcagggatatcattctttggatccaaatgctgtctgtgaaacagataaatggaaatacgaaaatccatgcaaaaaaatgtgcacagtttctgattatgtctctgaactatataataaaccgctatacgaagtgaattccaccatgacactaagttgcaacggcgaaacaaaatattttcgttgcgaagaaaaaaatggaaatacttcttggaatgatactgttacgtgtcctaatgcggaatgtcaacctcttcaattagaacacggatcgtgtcaaccagttaaagaaaaatactcatttggggaatatatgactatcaactgtgatgttggatatgaggttattggtgcttcgtacataagttgtacagctaattcttggaatgttattccatcatgtcaacaaaaatgtgatatgccgtctctatctaacggattaatttccggatctacattttctatcggtggcgttatacatcttagttgtaaaagtggttttacactaacggggtctccatcatccacatgtatcgacggtaaatggaatcccatactcccaatatgtgtacgaactaacgaaaaatttgatccagtggatgatggtcccgacgatgagacagatttgagcaaactctcgaaagacgttgtacaatatgaacaagaaatagaatcgttagaagcaacttatcatataatcatagtggcgttgacaattatgggcgtcatatttttaatctccgttatagtattagtttgttcctgtgacaaaaataatgaccaatataagttccataaattgctaccgtaaatataaatccgttaaaataattaataatttaataacaaacaagtatcaaaagattaaagacttatagctagaatcaattgagatgtcttcttcagtggatgttgatatctacgatgccgttagagcatttttactcaggcactattataacaagagatttattgtgtatggaagaagtaacgccatattacataatatatacaggctatttacaagatgcgccgttataccgttcgatgatatagtacgtactatgccaaatgaatcacgtgttaaacaatgggtgatggatacacttaatggtataatgatgaatgaacgcgatgtttctgtaagcgttggcaccggaatactattcatggaaatgtttttcgattacaataaaaatagtatcaacaatcaactaatgtatgatataattaatagcgtatctataattctagctaatgagagatatagaagcgcttttaacgacgatggtatatacatccgtagaaatatgattaacaagttgtacggatacgcatctctaactactattggcacgatcgctggaggtgtttgttattatctgttgatgcatctagttagtttgtataaataattatttcaatatactagttaaaattttaagattttaaatgtataaaaaactaataacgtttttatttgtaataggtgcattagcatcctattcgaataatgagtacactccgtttaataaactgagtgtaaaactctatatagatggagtagataatatagaaaattcatatactgatgataataatgaattggtgttaaattttaaagagtacacaatttctattattacagagtcatgcgacgtcggatttgattccatagatatagatgttataaacgactataaaattattgatatgtataccattgactcgtctactattcaacgcagaggtcacacgtgtagaatatctaccaaattatcatgccattatgataagtacccttatattcacaaatatgatggtgatgagcgacaatattctattactgcagagggaaaatgctataaaggaataaaatatgaaataagtatgatcaacgatgatactctattgagaaaacatactcttaaaattggatctacttatatatttgatcgtcatggacatagtaatacatattattcaaaatatgatttttaaaaatttaaaatatattatcacttcagtgacagtagtcaaataacaaacaacaccatgagatatattataattctcgcagttttgttcattaatagtatacatgctaaaataactagttataagtttgaatccgtcaattttgattccaaaattgaatggactggggatggtctatacaatatatcccttaaaaattatggcatcaagacgtggcaaacaatgtatacaaatgtaccagaaggaacatacgacatatccgcatttccaaagaatgatttcgtatctttctgggttaaatttgaacaaggcgattataaagtggaagagtattgtacgggactatgcgtcgaagtaaaaattggaccaccgactgtaacattgactgaatacgacgaccatatcaatttgtacatcgagcatccgtatgctactagaggtagcaaaaagattcctatttacaaacgcggtgacatgtgtgatatctacttgttgtatacggctaacttcacattcggagattctaaagaaccagtaccatatgatatcgatgactacgattgcacgtctacaggttgcagcatagactttgtcacaacagaaaaagtgtgcgtgacagcacagggagccacagaagggtttctcgaaaaaattactccatggagttcgaaagtatgtctgacacctaaaaagagtgtatatacatgcgcaattagatccaaagaagatgttcccaatttcaaggacaaaatggccagagttatcaagagaaaatttaatacacagtctcaatcttatttaactaaatttctcggtagcacatcaaatgatgttaccacttttcttagcatgcttaacttgactaaatattcataactaatttttattaatgatacaaaaacgaaataaaactgcatattatacactggttaacgcccttataggctctaaccattttcaagatgaggtccctgattatagtccttctgttcccctctatcatctactccatgtctattagacgatgtgagaagactgaagaggaaacatggggattgaaaatagggttgtgtataattgccaaagatttctatcccgaaagaactgattgcagtgttcatctcccaactgcaagtgaaggattgataactgaaggcaatggattcagggatatacgaaacaccgataaattataaaaaaagcaatgtgtccgctgtttccgttaataatactattttcgtaactggcggattattcataaataactctaatagcacgatcgtggttaacaatatggaaaaacttgacatttataaagacaaacaatggtcgattatagaaatgcctatggctagggtatatcacggcattgactcgacatttggaatgttatattttgccggaggtctatccgttaccgaacaatatggtaatttagagaaaaacaacgagatatcttgttacaatcctagaacgaataagtggtttgatatttcatatactatttataagatatccatatcatcattgtgtaaactaaataacgtcttctatgtatttagtaaggacattggatatgtggaaaagtatgatggtgcatggaagttagtacatgatcgtctccccgctataaaggcattatcaacttctccttattgattgaaaatgaaaatataaatagtttttatgtatagcagtattaccctatagttttattgcttactactaacatggatacagatgttacaaatgtagaagatatcataaatgaaatagatagagagaaagaagaaatactaaaaaatgtagaaattgaaaataataaaaacattaacaagaatcatcccaatgaatatattagagaagcactcgttattaataccagtagtaatagtgattccattgataaagaagttatagaatgtatcagtcacgatgtaggaatatagatcatatctactaatttttataatcgatacaaaacataaaaaacaactcgttattacatagcaggcatggaatccttcaagtattgttttgataacgatggcaagaaatggattatcggaaatactttatattctggtaattcaatactctataaggtcagaaaaaatttcactagttcgttctacaattacgtaatgaagatagatcacaaatcacacaagccattgttgtctgaaatacgattctatatatctgtattggatcctttgactatcgacaactggacacgggaacgtggtataaagtatttggctattccagatctgtatggaattggagaaaccgatgattatatgttcttcgttataaagaattcgggaagagtattcgccccaaaggatactgaatcagtcttcgaagcatgcgtcactatgataaacacgttagagtttatacactctcgaggatttacccatggaaaaatagaaccgaggaatatactgattagaaataaacgtctttcactaattgactattctagaactaacaaactatacaagagtggaaactcacatatagattacaacgaggacatgataacttcaggaaatatcaattatatgtgtgtagacaatcatcttggagcaacagtttcaagacgaggagatttagaaatgttgggatattgcatgatagaatggttcggtggcaaacttccatggaaaaacgaaagtagtataaaagtaataaaacaaaaaaaagaatataaaaaatttatagctactttctttgaggactgttttcctgaaggaaatgaacctctggaattagttagatatatagaattagtatacacgttagattattctcaaactcctaattatgacagactacgtaaactgtttatacaagattgaaattatattcttttttttatagagtgtggtagtgttacggatatctaatattaatattagactatctctatcgcgctacacgaccaatatcgattactatggatatcttctatgaaaggagagaatgtatttatttctccagcgtcaatctcgtcagtattgacaatactgtattatggagctaatggatccactgctgaacagctatcaaaatatgtagaaacggaggagaacacggataaggttagcgctcagaatatctcattcaaatccatgaataaagtatatgggcgatattctgccgtgtttaaagattcctttttgagaaaaattggcgataagtttcaaactgttgacttcactgattgtcgcactatagatgcaatcaacaagtgtgtagatatctttactgaggggaaaatcaatccactattggatgaaccattgtctcctagcaattagtgccgtatactttaaagcaaaatggttgacgccattcgaaaaggaatttaccagtgattatcccttttacgtatctccgacggaaatggtagacgtaagtatgatgtctatgtacggcaaggcatttaatcacgcatctgtaaaagaatcattcggcaacttttcaatcatagaactgccatatgttggagatactagtatgatggtcattcttccagacaagattgatggattagaatccatagaacaaaatctaacagatacaaattttaagaaatggtgtgactttatggatgctatgtttatagatgttcacattcccaagtttaaggtaacaggctcgtataatctggtggatactctagtaaagtcaggactgacagaggtgttcggttcaactggagattatagcaatatgtgtaatttagatgtgagtgtcgacgctatgatccacaaaacgtatatagatgtcaatgaagagtatacagaagcagctgcagcaacttctgtactagtggcagactgtgcatcaacaattacaaatgagttctgtgcagatcatccgttcatctatgtgattaggcatgttgatggaaaaattcttttcgttggtagatattgctctccgacaactaattgttaaccattttttttaaaaaaaatagaaaaaacatgtggtattagtgcaggtcgttgttcttccaattgcaattggtaagatgacggccaactttagtacccacgtcttttcaccacagcactgtggatgtgacagactgaccagtattgatgacgtcaaacaatgtttgactgaatatatttattggtcgtcctatgcataccgcaacaggcaatgcgctggacaattgtattccacactcctctcttttagagatgatgcggaattagtgttcatcgacattcgcgagctggtaaaaaatatgccgtgggatgatgtcaaagattgtacagaaatcatccgttgttatataccggatgagcaaaaaaccatcagagagatttcggccatcatcggactttgtgcatatgctgctacttactggggaggtgaagaccatcccactagtaacagtctgaacgcattgtttgtgatgcttgagatgctaaattacgtggattataacatcatattccggcgtatgaattgatgagttgtacatcttgacattttctttcttctcttctccctttcttctcttctcccttcctccctcttctccctttcccagaaacaaacttttttacccactataaaataaaatgagtatactacctattatatttcttcctatatttttttattcttcattcgttcagacttttaacgcgtctgaatgtatcgacaaagggcaatattttgcatcattcatggagttagaaaacgagccagtaatcttaccatgtcctcaaataaatacgctatcatccggatataatatattagatattttatgggaaaaacgaggagcggataatgatagaattataccgatagataatggtagcaatatgctaattctgaacccgacacaatcagactctggtatttatatatgcattaccacgaacgaaacctactgtgacatgatgtcgttaaatttgacaatcgtgtctgtctcagaatcaaatatagatcttatctcgtatccacaaatagtaaatgagagatctactggcgaaatggtatgtcccaatattaatgcatttattgctagtaacgtaaacgcagatattatatggagcggacatcgacgccttagaaataagagacttaaacaacggacacctggaattattaccatagaagatgttagaaaaaatgatgctggttattatacatgtgttttagaatatatatacggtggcaaaacatataacgtaaccagaattgtaaaattagaggtacgggatagaataataccttctactatgcaattaccagatggcattgtaacttcaataggtagtaatttgactattgcatgcagagtatcgttgagacctcccacaacggacaccgacgtcttttggataagtaatggtatgtattacgaagaagatgatggggacggaaacggtagaataagtgtagcaaataaaatctatatgaccgataagagacgtgttattacatcccggttaaacattaatcctgtcaaggaagaagatgctacaacgtttacgtgtatggcgtttactattcctagcatcagcaaaacagttactgttagtataacgtgaatgtatgttgttacatttccatgtcaattgagtttataagaatttttatacattatcttccaacaaacaattgacgaacgtattgctatgattaactcccacgatactatgcatattattaatcattaacttgcagactatacctagtgctattttgacatactcgtgttcttgtgtaattgcggtatctatattattaaagtacgtaaatctagctatagttttattatttaattttagataatataccgtctccttatttttaaaaattgccacatcctttattaaatcatgaatgggaatttctatgtcatcgttagtatattgtgaacaacaagagcagatatctataggaaagggtggaatgcgatacattgatctatgtagttttaaaacacacgcgaactttgaagaatttatataaatcattccatcgatacatccttctatgttgacatgtatatatccaggaattcttttattaatgtcaggaaatgtataaactaaaacattgcccgaaagcggtgcctctatctgcgttatatccgttcttaacttacaaaatgtaaccaatacctttgcatgacttgttttgttcggcaacgttagtttaaacttgacgaatggattaattacaatagcatgatccgcgcatctattaagtttttttactttaacgcccttgtatgtttttacagagactttatctaaatttctagtgcttgtatgtgttataaatataacgggatatagaaccgaatcacctaccttagatacccaattacattttatcagatccagataataaacaaattttgtcgccctaactaattctatattgttatatattttacaattggttatgatatcatgtaataacttggagtctaacgcgcatcgtcgtacgtttatacaattgtgatttagtgtagtatatctacacatgtatttttccgcactatagtattctggactagtgataaaactatcgttatatctgtcttcaatgaactcatcgagatattgctctctgtcatattcatacacctgcataaactttctagacatcttacaatccgtgttattttaggatcatatttacatatttacgggtatatcaaagatgttagattagttaatgggaatcgtctataataatgaatattaaacaattatatgaggacttttaccacaaagcatcataaaaatgagtcgtcgtctgatttatgttttaaatatcaaccgcaaatcaactcataaaatacaagagaatgaaatatatacatattttagtcattgcaatatagaccatacttctacagaacttgattttgtagttaaaaactatgatctaaacagacgacaacctgtaactgggtatactgcactacactgctatttgtataataattactttacaaacgatgtactgaagatattattaaatcatgacgtaaatgtaacgatgaaaaccagtagcggacgtatgcctgtttatatattgcttactagatgttgtaatatttcacatgatgtagtgatagatatgatagacaaagataaaaaccacttattacatagagactattccaacctattactagagtatataaaatctcgttacatgttattgaaggaagaggatatcgatgagaacatagtatccactttattagataagggaatcgatcctaactttaaacaagacggatatacagcgttacattattattatttgtgtctcgcacacgtttataaactaggtgagtgtagaaaaccgataacgataaaaaaggccaagcgaattatttctttgtttatacaacatggagctaatctaaacgcgttagataattgtggtaatacaccattccatttgtatcttagtattgaaatgtgtaataatattcatatgactaaaatgctgttgacttttaatccgaatttcaaaatatgtaataatcatggattaacgcctatactatgttatataacttccgactacatacaacacgatattcttgttatgttaatacatcactatgaaacaaatgttggagaaatgccgatagatgagcgtcgtatgatcgtattcgagtttatcaaaacatattctacacgtccggcagattcgataacttatttgatgaataggtttaaaaatataaatatttatacccgctatgaaggaaagacattattacacgtagcatgtgaatataataatacacaagtaatagattatcttatacgtatcaacggagatataaatgcgttaaccgacaataacaaacacgctacacaactcattatagataacaaagaaaattccccatataccattaattgtttactgtatatacttagatatattgtagataagaatgtgataagatcgttggtggatcaacttccatctctacctatcttcgatataaaatcatttgagaaattcatatcctactgtatacttttagatgacacattttacgataggcacgttaagaatcgcgattctaaaacgtatcgatacgcattttcaaaatacatgtcgtttgataaatacgatggtataataactaaatgtcacgacgaaacaatgttactcaaactgtccactgttctagacactacactatatgcagttttaagatgtcataattcgagaaagttaagaagatacctcaacgagttaaaaaaatataataacgataagtcctttaaaatatattctaatattatgaatgagagataccttaatgtatattataaagatatgtacgtgtcaaaggtatatgataaactatttcctgttttcacagataaaaattgtctactaacattactaccttcagaaattatatacgaaatattatacatgctgacaattaacgatctttataatatatcgtatccacctaccaaagtatagttgtatttttctcatgcgatgtgtgtaaaaaaactgatattatataaatattttagtgccgtataataaagatgacgatgaaaatgatggtacatatatatttcgtatcattattgttattgctattccacagttacgccatagacatcgaaaatgaaatcacagaattcttcaataaaatgagagatactctaccagctaaagactctaaatggttgaatccagcatgtatgttcggaggcacaatgaatgatatagccgctctaggagagccattcagcgcaaagtgtcctcctattgaagacagtcttttatcgcacagatataaagactatgtggttaaatgggagaggctagaaaagaatagacggcgacaggtttctaataaacgtgttaaacatggtgatttatggatagccaactatacatctaaattcagtaaccgtaggtatttgtgcaccgtaactacaaagaatggtgactgtgttcagggtatagttagatctcatattaaaaaacctccttcatgcattccaaaaacatatgaactaggtactcatgataagtatggcatagacttatactgtggaattctttacgcaaaacattataataatataacttggtataaagataataaggaaattaatatcgacgacattaagtattcacaaacgggaaaggaattaattattcataatccagagttagaagatagcggaagatacgactgttacgttcattacgacgacgttagaatcaagaatgatatcgtagtatcaagatgtaaaatacttacggttataccgtcacaagaccacaggtttaaactaatactagatccgaaaatcaacgtaacgataggagaacctgccaatataacatgcactgctgtgtcaacgtcattattgatcgacgatgtactgattgaatgggaaaatccatccggatggcttataggattcgattttgatgtatactctgttttaactagtagaggcggtatcaccgaggcgaccttgtactttgaaaatgttactgaagaatatataggtaatacatataaatgtcgtggacacaactattattttgaaaaaacccttacaactacagtagtattggagtaaatatacaatgcatttttatatacattactgaattattattactgaattattattactgaattattattaattatatcgtatttgtgctatagaatggatgaagatacgcgactatctaggtatttgtatctcaccgatagagaacatataaatgtagactctattaaacagttgtgtaaaatatcagatcctaatgcatgttatagatgtggatgtacggctttacatgagtacttttataattatagatcagtcaacggaaaatacaagtatagatacaacggttactatcaatattattcatctagcgattatgaaaattataatgaatattattatgatagaactggtatgaacagtgagagtgataatatatcaatcaaaacagaatatgaattctatgatgaaacacaagatcaaagtacacaactagtaggttacgacattaaactcaaaaccaatgaggatgattttatggctatgatagatcagtgggtgtccatgattatatagatgaatcaattaataaagtagtatatggaagagagtctcacgtaagatggcgggatatatggcaagaacataatgatggcgtatacagtataggaaaggagtgcatagataatatatacgaagacaaccataccgtagacgaattctacaagatagacagcgtatcagatgtagatgacgcggaacacatatctccgataactaaaaaaccatagaatcagttgatgataatacctacatttctaatcttccgtataccatcaaatacaaaatattcgagcaacaataagtattttttatacctttaaaactgataaataaattttttctagtgatattttggcaagatgagaatcctatttctcatcgctttcatgtatgggtgtgttcactcatatgttaacgcggttgaaaccaaatgtccaaatctagacattgtaacatcttctggagaatttcattgttcaggatgtgtggaacatatgcctgagtttagctatatgtattggttggcaaaggatatgaaatcggacgaggataccaagtttatagaacatctgggtgatggcatcaaagaagatgaaaccgttcgtaccacagatagtggaatcgtcactctacgtaaagtccttcatgtgactgatactaataaatttgataattataggttcacttgtgtcctcgctacgctagatggcatttataaaaagaatgtttgctgaagtagttgtgtgctactatttttatttatgatataatctaatggaattaatttgaattgatatttatccaatactaaagattatattagaatcaaattaatcttttatacgagaaaaaataacgacatacgtcgtcaacaaattaaactttttatttattagttaactagcttatagaacttgctcattgttatgtttctaaaacgggtacggcatataggacaattatccgacgcaccggtttctcttcgtgttctatgccatatattgatgcatgttatgcaaaatatatgagtacacgaatccaataaaccaaagtatctatcgttttgagtaaacaacttcatagcaaattccacattctttttctttacttactctatacacgtcctcgtatttatttagtattttgatgatatccaactcagaaatggttgttgtattattgggtgtatttggagtataggtattattagctatgtaccaatttaccaaccctcttaatattgattgataatcacatcggttatccaattaataactaaattgtagtgtatatatagaccatatatgtttctatttttttgacagttacgtatagtttcagtaagttttgattgttgtattcctgtatctctagataagttagtcatatagtcccttccggcgatacgttttttccaagcccgaaattgattagccaaatgtgtatttatttttgtgatattgatataatatttcggataatgcatactgttagtcttatatcatttggttcatctatgtattgtaatattgttacatgatctatagatgatgtattgattttggcaggatcgaattccatatccgcgactaaacagtgaaaaaaatgtaaatactttttaaattttaaattagtaaaacttttttttattttttatgattccaaaaatactgaatacaaagtcctaaattataaatatggagatcatactaccacaacttattattatgtatacaaggccggtgtaatagatagatatatataattctattacaccggcagacaattaccgaccggtatttgtcgttaccaacataccgtataatatgtaatatacaattccataacccattgacagttgttatacatcaaaattgcaattcttttgattacgatgttataagaatgtagttaattgatgtatgatgttaatgtgtcctctttcctcttataacatcgtaatcaaaaacttttttataatatatacctaataatgtgtcttaatagttctcgtgattcgtcaaacaatcattcttataaaatataataaagcaacgtaaaaacacataaaaataagcgtaactaataagacaatggatatttacgacgataaaggtctacagactattaaactgtttaataatgaatttgattgtataaggaatgacatcagagaattatttaaacatgtaactgattccgatagtatacaacttccgatggaagacaattctgatattatagaaaatatcagaaaaatactatatagacgattaaaaaatgtagaatgtgttgacatcgataacacaataacttttatgaaatacgatccaaatgatgataataagcgtacgtgttctaattgggtacccttaactaataactatatggaatattgtctagtaatatatttggaaacaccgatatgtggaggcaaaataaaattataccaccctacaggaaatataaagtcggataaggatattatgtttgcaaagactctagactttaaatcaacgaaagtgttaactggacgtaaaacaattgccgttctagacatatccgtttcatataatagatcaatgactactattcactacaacgacgacgttgatatagatatacatactgataaaaatggaaaagagttatgttattgttatataacaatagatgatcattacttggttgatgtggaaactataggagttatagtcaatagatctggaaaatgtctgttagtaaataaccatctaggtataggtatcgttaaagataaacgtataagcgatagttttggagatgtatgtatggatacaatatttgacttttctgaagcacgagagttattttcattaactaatgatgataacaggaatatagcatgggacactgataaactagacgatgatacagatatatggactcccgtcacagaagatgattacaaatttctttctagactagtattgtatgcaaaatctcaatcggatactgtatttgactattatgttcttactggtgatacggaaccacccactgtattcattttcaaggtaactagattttactttaatatgccgaaataaaaaatttttgtataatatctagaggtagaggtattgtttagataaatacaaataacatagatacatcgcatacttagcatttttataaatatacataagacatacactttatacatttttgtaaaaatactcataaaaaaatttataaaaattatggcacaaccatatcttgtataggtagtttagttcgtcgagtgaacctataaacagataatagacaacacataataatgcctactaatacaagcataataccgggagatgggatatatgacgttgtagtgtttgggttttctgaacgttgatagtctactaatactacatgctgacatctaatgcctgtataaccatgagagcatctacaatacataccgtcaatatctctagcgtggatacagtcaccgtgtaaacaatatccatctccctctggaccgcataatctgatagctggaatatctgttgtagcgtttgtaatttctggcaatgtcgtttcgatagcgttaccactatcggcgaatgatctgattatcatagcagcgaacaacaacatcagataatttatcaacatttttgatggattctgtgtttatgctgtttctcagtgtgtgtttatgacaagattgggaattttatattattaattcagtaatataaactaataatatattgttaattgtgtaaataatataaaaataacaatacaatattgaatgtgttgctgttaaaaatgtatgtgttaatataatagaataaaataaatgagtatgatcattttagataacgattgattttatcattaccgcttcattcttatattctttgcttacggaacctatatttagaaacatctactaacaattttttatgcttgcattattaatggtatgtaatatgattgattgtgtacgcaataccaatttgttaagtatgaatacggggtacaaacataaattgaaatttaacattatttatttatgatatatatcgttatcgttaggtctataccatggatatctttaaagaactaatcttaaaacaccctgatgaaaatgttttgatttctccagtttccattttatctactttatctattctaaatcatggagcagctggttctacagctgaacaactatcaaaatatatagagaatatgaatgagaatacacccgatgacaataatgatgacatggaggtagatattccgtattgtgcgacactagctaccgcaaataaaatatacggtagcgatagtatcgagttccacgcctccttcctacaaaaaataaaagacgattttcaaactgtaaactttaataatgctaaccaaacaaaggaactaatcaacgaatgggttaagacaatgacaaatggtaaaattaattccttattgactagtccgctatccattaatactcgtatgacagttgttagcgccgtccattttaaagcaatgtggaaatatccattttctaaacatcttacatatacagacaagttttatatttctaagaatatagttaccagcgttgatatgatggtgggtaccgagaataacttgcaatatgtacatattaatgaattattcggaggattctctattatcgatattccatacgagggaaactctagtatggtaattatactaccggacgacatagaaggtatatataacatagaaaaaaatataacagatgaaaaatttaaaaaatggtgtggtatgttatctactaaaagtatagacttgtatatgccaaagtttaaagtggaaatgacagaaccgtataatctggtaccgattttagaaaatttaggacttactaatatattcggatattatgcagattttagcaagatgtgtaatgaaactatcactgtagaaaaatttctacatacgacgtttatagatgttaatgaggagtatacagaagcatcggccgttacaggagtatttacgattaacttttcgatggtatatcgtacgaaggtctacataaaccatccattcatgtacatgattaaagacaccacaggacgtatactttttatagggaaatactgctatccgcaataaatataaacaaatagacttttataaagagtcttcaacgataagtatatcgacatactacttatgctgcgaaagattctgaacgagaacgactatctcaccctcttggatcatatccgcactgctaaatactaaatctccactacactttttatcatcttatgaggaatgattgccttcgtgaaataggaataattagcaccagaatagctatggattattgtggtagagagtgcactattctatgtcgtctactggatgaagatgtgacgtacaaaaaaataaaactagaaattgaaacgtgtcacaacttatcaaaacatatagatagacgaggaaacaatgcgctacattgttacgtctccaataaatgcgatacagacattaagattgttctctcgcggagtcgagagactttgtagaaacaacgaaggattaactccgctaggagtatacagtaagcatagatacgtaaaatctcagattgtgcatctactgatatccagctattcaaattcctctaacgaactcaagtcgaatataaatgatttcgatctgtattcggataatatcgacttacgtctgctaaaatacctaattgtggataaacggatacgtccgtccaagaatacgaattatgcaatcaatggtctcggattggtggatatatacgtaacgacgcctaatccgagaccagaagtattgctatggcttcttaaatcagaatgttacagcaccggttacgtatttcgtacctgtatgtacgacagtgatatgtgtaagaactctcttcattactatatatcgtctcatagagaatctcaatctctatccaaggatgtaattaaatgtttgatcgataacaatgtttccatccatggcagagacgaaggaggatctttacccatccaatactactggtctttctcaaccatagatatagagattgttaaattattattaataaaggatgtggacacgtgtagagtatacgacgtcagccctatattagaggcgtattatctaaacaagcgatttagagtaaccccatataatgtagacatggaaatcgttaatcttcttattgagagacgtcatactcttgtcgacgtaatgcgtagtattacttcgtacgattccagagaatataaccactacatcatcgataacattctaaagagatttagacaacaggatgaatccatcgtacaagccatactgataaactacttacattacggcgatatggtcgttcgatgcatgttagataacggacaacaactatcctctacacgactactttgttaataataatctcgtcgatgtaaacgtcgtaaggtttatcgtggaaaatatggacacgcggctgtaaatcacgtatcgaacaatggccgtctatgtatgtacggtctgatattatcgagatttaataattgcgggtatcactgttatgaaaccatactgatagatgtatttgatatactaagcaagtacatggatgatatagatatgatcgataactctactatattacgcggtcgatgtcaataatatacaatttgcaaagcggttattggaatatggagcgagtatcacgctcgataatcaatacggccatccagaaaagcagttacagaagagaaaacaaaacgaaatcgttgttctacaagatgtctctccctacgacgattactacgtaaaaaagatactagcctactgcctattaagggacgagtcattcgcggaactacatagtaaattctgtttaaacgaggactataaaagtgtatttatgaaaaatatatcattcgataagatagattccatcatcgtgacataagtcgcctcaaagagattcgaatctccgacaccgacctgtatacggtatcacagctatcttaaagccatacattcagacagtcacatttcatttcccatgtacgacgatctcatagaacagtgccatctatcgatggagcgtaaaagtaaactcgtcgacaaagcactcaataaattagagtctaccatcggtcaatctagactatcgtatttgcctccggaaattatgcgcaatatcatctaaacagtatgttgtacggaaagaaccattacaaatattatccatgatagaaagaaaatatctatatgattggagaagtaggaaacaggaacaagacaacgattactacattattaaatcatgaagtccgtattatactcgtatatattgtttctctcatgtataataataaacggaagagatatagcaccgcatgcaccatccgatggaaagtgtaaagacaacgaatacaaacgccataatttgtgtccgggaacatacgcttccagattatgcgatagcaagactaacacacgatgtacgccgtgtggttcgggtaccttcacatctcgcaataatcatttacccgcttgtctaagttgtaacggaagacgcgatcgtgtaacacgactcacaatagaatctgtgaatgctctcccggatattattgtcttctcaaaggatcatccggatgcaaggcatgtgtttcccaaacaaaatgtggaataggatacggagtatccggagacgtcatctgttctccgtgtggtctcggaacatattctcacaccgtctcttccgcagataaatgcgaacccgtacccagaaatacgtttaactatatcgatgtggaaattaacctgtatccagttaacgacacgtcgtgtactcggacgaccactaccggtctcagcgaatccatctcaacgtcggaactaactattactatgaatcataaagactgtaatcccgtatttcgtgatggatacttctccgttcttaataaggtagcgacttcaggtttctttacaggagaaaggtgtgcactctgaatttcgagattaaatgcaataacaaagattcttcctccaaacagttaacgaaagcaaagaatgatactatcatgccgcattcggagacagtaactctagtgggcgacatctatatactatatagtaataccaatactcaagactacgaaactgatacaatctcttatcatgtgggtaatgttctcgatgtcgatagccatatgcccggtagttgcgatatacataaactgatcactaattccaaacccacccactttttatagtaagtttttcacccataaataataaatacaataattaatttctcgtaaaagtagaaaatatattctaatttattgcacggtaaggaagtagaatcataaagaacagtactcaatcaatagcaattatgaaacaatatatcgtcctggcatgcatgtgcctggcggcagctgctatgcctgccagtcttcagcaatcatcctcatcctcctcctcgtgtacggaagaagaaaacaaacatcatatgggaatcgatgttattatcaaagtcacaaagcaagaccaaacaccgaccaatgataagatttgccaatccgtaacggaaattacagagtccgagtcagatccagatcccgaggtggaatcagaagatgattccacatcagtcgaggatgtagatcctcctaccacttattactccatcatcggtggaggtctgagaatgaactttggattcaccaaatgtcctcagattaaatccatctcagaatccgctgatggaaacacagtgaatgctagattgtccagcgtgtccccaggacaaggtaaggactctcccgcgatcactcatgaagaagctcttgctatgatcaaagactgtgaagtgtctatcgacatcagatgtagcgaagaagagaaagacagcgacatcaagacccatccagtactcgggtctaacatctctcataagaaagtgagttacgaagatatcatcggttcaacgatcgtcgatacaaaatgcgtcaagaatctagagtttagcgttcgtatcggagacatgtgcaaggaatcatctgaacttgaggtcaaggatggattcaagtatgtcgacggatcggcatctgaaggtgcaaccgatgatacttcactcatcgattcaacaaaactcaaagcgtgtgtctgaatcgataactctattcatctgaaattggatgagtagggttaatcgaacgattcaggcacaccacgaattaaaaaagtgtaccggacactatattccggtttgcaaaacaaaaatgttcttaactacattcacaaaaagttacctctcgcgacttcttctttttctgtctcaatagtgtgatacgattatgacactattcctattcctattcctatttcctttcagagtatcacaaaaatattaaacctctttctgatggtctcataaaaaaagttttacaaaaatatttttattctctttctctctttgatggtctcataaaaaaagttttacaaaaatatttttattctctttctctctttgatggtctcataaaaaaagttttacaaaaatatttttattctctttctctctttgatggtctcataaaaaaagttttacaaaaatatttttattctctttctctctttgatggtctcataaaaaaagttttacaaaaatatttttattctctttctctctttgatggtctcataaaaaaagttttacaaaaatatttttattctctttctctctttgatggtctcataaaaaaagttttacaaaaatatttttattctctttctctctttgatggtctcataaaaaaagttttacaaaaatatttttattctctttctctctttgatggtctcataaaaaaagttttacaaaaatatttttattctctttctctctttgatggtctcataaaaaaagttttacaaaaatatttttattctctttctctctttgatggtctcataaaaaaagttttacaaaaatatttttattctctttctctctttgatggtctcataaaaaaagttttacaaaaatatttttattctctttctctctttgatggtctcataaaaaagttttacaaaaatatttttattctctttctctctttgatggtctcataaaaaagttttacaaaaatatttttattctctttctctctttgatggtctcataaaaaaagttttacaaaaatatttttattctctttctctctttgatggtctcataa

SEQ ID NO: 211 - DNA, 195695 bp, Artificial Sequence
  GLV-1h354
ttatgagaccatcaaagagagaaagagaataaaaatatttttgtaaaactttttttatgagaccatcaaagagagaaagagaataaaaatatttttgtaaaacttttttatgagaccatcaaagagagaaagagaataaaaatatttttgtaaaacttttttatgagaccatcaaagagagaaagagaataaaaatatttttgtaaaactttttttatgagaccatcaaagagagaaagagaataaaaatatttttgtaaaactttttttatgagaccatcaaagagagaaagagaataaaaatatttttgtaaaactttttttatgagaccatcaaagagagaaagagaataaaaatatttttgtaaaactttttttatgagaccatcaaagagagaaagagaataaaaatatttttgtaaaactttttttatgagaccatcaaagagagaaagagaataaaaatatttttgtaaaactttttttatgagaccatcaaagagagaaagagaataaaaatatttttgtaaaactttttttatgagaccatcaaagagagaaagagaataaaaatatttttgtaaaactttttttatgagaccatcaaagagagaaagagaataaaaatatttttgtaaaactttttttatgagaccatcaaagagagaaagagaataaaaatatttttgtaaaactttttttatgagaccatcaaagagagaaagagaataaaaatatttttgtaaaactttttttatgagaccatcaaagagagaaagagaataaaaatatttttgtaaaactttttttatgagaccatcagaaagaggtttaatatttttgtgatactctgaaaggaaataggaataggaataggaatagtgtcataatcgtatcacactattgagacagaaaaagaagaagtcgcgagaggtaactttttgtgaatgtagttaagaacatttttgttttgcaaaccggaatatagtgtccggtacacttttttaattcgtggtgtgcctgaatcgttcgattaaccctactcatccaatttcagatgaatagagttatcgattcagacacacgctttgagttttgttgaatcgatgagtgaagtatcatcggttgcaccttcagatgccgatccgtcgacatacttgaatccatccttgacctcaagttcagatgattccttgcacatgtctccgatacgaacgctaaactctagattcttgacgcattttgtatcgacgatcgttgaaccgatgatatcttcgtaactcactttcttatgagagatgttagacccgagtactggatgggtcttgatgtcgctgtctttctcttcttcgctacatctgatgtcgatagacacttcacagtctttgatcatagcaagagcttcttcatgagtgatcgcgggagagtccttaccttgtcctggggacacgctggacaatctagcattcactgtgtttccatcagcggattctgagatggatttaatctgaggacatttggtgaatccaaagttcattctcagacctccaccgatgatggagtaataagtggtaggaggatctacatcctcgactgatgtggaatcatcttctgattccacctcgggatctggatctgactcggactctgtaatttccgttacggattggcaaatcttatcattggtcggtgtttggtcttgctttgtgactttgataataacatcgattcccatatgatgtttgttttcttcttccgtacacgaggaggaggatgaggatgattgctgaagactggcaggcatagcagctgccgccaggcacatgcatgccaggacgatatattgtttcataattgctattgattgagtactgttctttatgattctacttccttaccgtgcaataaattagaatatattttctacttttacgagaaattaattattgtatttattatttatgggtgaaaaacttactataaaaagtgggtgggtttggaattagtgatcagtttatgtatatcgcaactaccgggcatatggctatcgacatcgagaacattacccacatgataagagattgtatcagtttcgtagtcttgagtattggtattactatatagtatatagatgtcgcccactagagttactgtctccgaatgcggcatgatagtatcattctttgctttcgttaactgtttggaggaagaatctttgttattgcatttaatctcgaaattcagagtgcacacctttctcctgtaaagaaacctgaagtcgctaccttattaagaacggagaagtatccatcacgaaatacgggattacagtctttatgattcatagtaatagttagttccgacgttgagatggattcgctgagaccggtagtggtcgtccgagtacacgacgtgtcgttaactggatacaggttaatttccacatcgatatagttaaacgtatttctgggtacgggttcgcatttatctgcggaagagacggtgtgagaatatgttccgagaccacacggagaacagatgacgtctccggatactccgtatcctattccacattttgtttgggaaacacatgccttgcatccggatgatcctttgagaagacaataatatccgggagagcattcacagattctattgtgagtcgtgttacacgatcgcgtcttccgttacaacttagacaagcgggtaaatgattattgcgagatgtgaaggtacccgaaccacacggcgtacatcgtgtgttagtcttgctatcgcataatctggaagcgtatgttcccggacacaaattatggcgtttgtattcgttgtctttacactttccatcggatggtgcatgcggtgctatatctcttccgtttattattatacatgagagaaacaatatatacgagtataatacggacttcatgatttaataatgtagtaatcgttgtcttgttcctgtttcctacttctccaatcatatagatattttctttctatcatggataatatttgtaatggttctttccgtacaacatactgtttagatgatattgcgcataatttccggaggcaaatacgatagtctagattgaccgatggtagactctaatttattgagtgctttgtcgacgagtttacttttacgctccatcgatagatggcactgttctatgagatcgtcgtacatgggaaatgaaatgtgactgtctgaatgtatggctttaagatagctgtgataccgtatacaggtcggtgtcggagattcgaatctctttgaggcgacttatgtcacgatgatggaatctatcttatcgaatgatatatttttcataaatacacttttatagtcctcgtttaaacagaatttactatgtagttccgcgaatgactcgtcccttaataggcagtaggctagtatcttttttacgtagtaatcgtcgtagggagagacatcttgtagaacaacgatttcgttttgttttctcttctgtaactgcttttctggatggccgtattgattatcgagcgtgatactcgctccatattccaataaccgctttgcaaattgtatattattgacatcgaccgcgtaatatagtagagttatcgatcatatctatatcatccatgtacttgcttagtatatcaaatacatctatcagtatggtttcataacagtgatacccgcaattattaaatctcgataatatcagaccgtacatacatagacggccattgttcgatacgtgatttacagccgcgtgtccatattttccacgataaaccttacgacgtttacatcgacgagattattattaacaaagtagtcgtgtagaggatagttgttgtccgttatctaacatgcatcgaacgaccatatcgccgtaatgtaagtagtttatcagtatggcttgtacgatggattcatcctgttgtctaaatctctttagaatgttatcgatgatgtagtggttatattctctggaatcgtacgaagtaatactacgcattacgtcgacaagagtatgacgtctctcaataagaagattaacgatttccatgtctacattatatggggttactctaaatcgcttgtttagataatacgcctctaatatagggctgacgtcgtatactctacacgtgtccacatcctttattaataataatttaacaatctctatatctatggttgagaaagaccagtagtattggatgggtaaagatcctccttcgtctctgccatggatggaaacattgttatcgatcaaacatttaattacatccttggatagagattgagattctctatgagacgatatatagtaatgaagagagttcttacacatatcactgtcgtacatacaggtacgaaatacgtaaccggtgctgtaacattctgatttaagaagccatagcaatacttctggtctcggattaggcgtcgttacgtatatatccaccaatccgagaccattgattgcataattcgtattcttggacggacgtatccgtttatccacaattaggtattttagcagacgtaagtcgatattatccgaatacagatcgaaatcatttatattcgacttgagttcgttagaggaatttgaatagctggatatcagtagatgcacaatctgagattttacgtatctatgcttactgtatactcctagcggagttaatccttcgttgtttctacaaagtctctcgactccgcgagagaacaatcttaatgtctgtatcgcatttattggagacgtaacaatgtagcgcattgtttcctcgtctatctatatgttttgataagttgtgacacgtttcaatttctagttttatttttttgtacgtcacatcttcatccagtagacgacatagaatagtgcactctctaccacaataatccatagctattctggtgctaattattcctatttcacgaaggcaatcattcctcataagatgataaaaagtgtagtggagatttagtatttagcagtgcggatatgatccaagagggtgagatagtcgttctcgttcagaatctttcgcagcataagtagtatgtcgatatacttatcgttgaagactctttataaaagtctatttgtttatatttattgcggatagcagtatttccctataaaaagtatacgtcctgtggtgtctttaatcatgtacatgaatggatggtttatgtagaccttcgtacgatataccatcgaaaagttaatcgtaaatactcctgtaacggccgatgcttctgtatactcctcattaacatctataaacgtcgtatgtagaaatttttctacagtgatagtttcattacacatcttgctaaaatctgcataatatccgaatatattagtaagtcctaaattttctaaaatcggtaccagattatacggttctgtcatttccactttaaactttggcatatacaagtctatacttttagtagataacataccacaccattttttaaatttttcatctgttatatttttttctatgttatatataccttctatgtcgtccggtagtataattaccatactagagtttccctcgtatggaatatcgataatagagaatcctccgaataattcattaatatgtacatattgcaagttattctcggtacccaccatcatatcaacgctggtaactatattcttagaaatataaaacttgtctgtatatgtaagatgtttagaaaatggatatttccacattgctttaaaatggacggcgctaacaactgtcatacgagtattaatggatagcggactagtcaataaggaattaattttaccatttgtcattgtcttaacccattcgttgattagttcctttgtttggttagcattattaaagtttacagtttgaaaatcgtcttttattttttgtaggaaggaggcgtggaactcgatactatcgctaccgtatattttatttgcggtagctagtgtcgcacaatacggaatatctacctccatgtcatcattattgtcatcgggtgtattctcattcatattctctatatattttgatagttgttcagctgtagaaccagctgctccatgatttagaatagataaagtagataaaatggaaactggagaaatcaaaacattttcatcagggtgttttaagattagttctttaaagatatccatggtatagacctaacgataacgatatatatcataaataaataatgttaaatttcaatttatgtttgtaccccgtattcatacttaacaaattggtattgcgtacacaatcaatcatattacataccattaataatgcaagcataaaaaattgttagtagatgtttctaaatataggttccgtaagcaaagaatataagaatgaagcggtaatgataaaatcaatcgttatctaaaatgatcatactcatttattttattctattatattaacacatacatttttaacagcaacacattcaatattgtattgttatttttatattatttacacaattaacaatatattattagtttatattactgaattaataatataaaattcccaatcttgtcataaacacacactgagaaacagcataaacacagaatccatcaaaaatgttgataaattatctgatgttgttgttcgctgctatgataatcagatcattcgccgatagtggtaacgctatcgaaacgacattgccagaaattacaaacgctacaacagatattccagctatcagattatgcggtccagagggagatggatattgtttacacggtgactgtatccacgctagagatattgacggtatgtattgtagatgctctcatggttatacaggcattagatgtcagcatgtagtattagtagactatcaacgttcagaaaacccaaacactacaacgtcatatatcccatctcccggtattatgcttgtattagtaggcattattatgtgttgtctattatctgtttataggttcactcgacgaactaaactacctatacaagatatggttgtgccataatttttataaatttttttatgagtatttttacaaaaatgtataaagtgtatgtcttatgtatatttataaaaatgctaagtatgcgatgtatctatgttatttgtatttatctaaacaatacctctacctctagatattatacaaaaattttttatttcggcatattaaagtaaaatctagttaccttgaaaatgaatacagtgggtggttccgtatcaccagtaagaacataatagtcaaatacagtatccgattgagattttgcatacaatactagtctagaaagaaatttgtaatcatcttctgtgacgggagtccatatatctgtatcatcgtctagtttatcagtgtcccatgctatattcctgttatcatcattagttaatgaaaataactctcgtgcttcagaaaagtcaaatattgtatccatacatacatctccaaaactatcgcttatacgtttatctttaacgatacctatacctagatggttatttactaacagacattttccagatctattgactataactcctatagtttccacatcaaccaagtaatgatcatctattgttatataacaataacataactcttttccatttttatcagtatgtatatctatatcaacgtcgtcgttgtagtgaatagtagtcattgatctattatatgaaacggatatgtctagaacggcaattgttttacgtccagttaacactttcgttgatttaaagtctagagtctttgcaaacataatatccttatccgactttatatttcctgtagggtggtataattttattttgcctccacatatcggtgtttccaaatatattactagacaatattccatatagttattagttaagggtacccaattagaacacgtacgcttattatcatcatttggatcgtatttcataaaagttattgtgttatcgatgtcaacacattctacattttttaatcgtctatatagtatttttctgatattttctataatatcagaattgtcttccatcggaagttgtatactatcggaatcagttacatgtttaaataattctctgatgtcattccttatacaatcaaattcattattaaacagtttaatagtctgtagacctttatcgtcgtaaatatccattgtcttattagttacgcttatttttatgtgtttttacgttgctttattatattttataagaatgattgtttgacgaatcacgagaactattaagacacattattaggtatatattataaaaaagtttttgattacgatgttataagaggaaagaggacacattaacatcatacatcaattaactacattcttataacatcgtaatcaaaagaattgcaattttgatgtataacaactgtcaatgggttatggaattgtatattacatattatacggtatgttggtaacgacaaataccggtcggtaattgtctgccggtgtaatagaattatatatatctatctattacaccggccttgtatacataataataagttgtggtagtatgatctccatatttataatttaggactttgtattcagtatttttggaatcataaaaaataaaaaaaagttttactaatttaaaatttaaaaagtatttacatttttttcactgtttagtcgcggatatggaattcgatcctgccaaaatcaatacatcatctatagatcatgtaacaatattacaatacatagatgaaccaaatgatataagactaacagtatgcattatccgaaatattatatcaatatcacaaaaataaatacacatttggctaatcaatttcgggcttggaaaaaacgtatcgccggaagggactatatgactaacttatctagagatacaggaatacaacaatcaaaacttactgaaactatacgtaactgtcaaaaaaatagaaacatatatggtctatatatacactacaatttagttattaattggataaccgatgtgattatcaatcaatattaagagggttggtaaattggtacatagctaataatacctatactccaaatacacccaataatacaacaaccatttctgagttggatatcatcaaaatactaaataaatacgaggacgtgtatagagtaagtaaagaaaaagaatgtggaatttgctatgaagttgtttactcaaaacgatagatactttggtttattggattcgtgtactcatatattttgcataacatgcatcaatatatggcatagaacacgaagagaaaccggtgcgtcggataattgtcctatatgccgtacccgttttagaaacataacaatgagcaagttctataagctagttaactaataaataaaaagtttaatttgttgacgacgtatgtcgttattttttctcgtataaaagattaatttgattctaatataatctttagtattggataaatatcaattcaaattaattccattagattatatcataaataaaaatagtagcacacaactacttcagcaaacattctttttataaatgccatctagcgtagcgaggacacaagtgaacctataattatcaaatttattagtatcagtcacatgaaggactttacgtagagtgacgattccactatctgtggtacgaacggtttcatcttctttgatgccatcacccagatgttctataaacttggtatcctcgtccgatttcatatcctttgccaaccaatacatatagctaaactcaggcatatgttccacacatcctgaacaatgaaattctccagaagatgttacaatgtctagatttggacatttggtttcaaccgcgttaacatatgagtgaacacacccatacatgaaagcgatgagaaataggattctcatcttgccaaaatatcactagaaaaaatttatttatcagttttaaaggtataaaaaatacttattgttgctcgaatattttgtatttgatggtatacggaagattagaaatgtaggtattatcatcaactgattctatggttttatgtattctatcatgtttcactattgcgttggaaataatatcatatgcttccacatatattttattttgttttaactcataatactcacgtaattctggattattggcatatctatgaataattttagctccatgatcagtaaatattaatgagaacatagtattaccacctaccattatttttttcatctcattcaattcttaattgcaaagatctatataatcattatagcgttgacttatggactctggaatcttagacgatgtacagtcatctataatcatggcatatttaatacattgttttatagcatagtcgttatctacgatgttagatatttctctcaatgaatcaatcacacaatctaatgtaggtttatgacataatagcattttcagcagttcaatgtttttagattcgttgatggcaatggctatacatgtatatccgttatttgatctaatgttgacatctgaaccggattctagcagtaaagatactagagattgtttattatatctaacagccttgtgaagaagtgtttctcctcgtttgtcaatcatgttaatgtctttaagataaggtaggcaaatgtttatagtactaagaattgggcaagcataagacatgtcacaaagacccttttttgtatgtataagtgtaaaaattataacatccatagttggatttacataggtgtccaatcgggatctctccatcatcgagataattgatggcatctcccttccttttttagtagatatttcatcgtgtaagaatcaatattaatatttctaaagtatccgtgtatagcctctttatttaccacagctccatattccactagagggatatcgccgaatgtcatatactcaattagtatatgttggaggacatccgagttcattgttttcaatatcaaagagatggtttccttatcatttctccatagtggtacaatactacacattattccgtgcggctttccattttccaaaaacaatttgaccaaatctaaatctacatctttattgtatctataatcactatttagataatcagccataattcctcgagtgcaacatgttagatcgtctatatatgaataagcagtgttatctattcctttcattaacaatttaacgatgtctatatctatatgagatgacttaatataatattgaagagctgtacaatagtttttatctataaaagacggcttgattccgtgattaattagacatttaacaacttccggacgcacatatgctctcgtatccgactctgaatacagatgagagatgatatacagatgcaatacggtaccgcaatttcgtagttgataatcatcatacgcgtatcagtactcgtcctcataaagaacactgcagccattttctatgaacaaatcaataattttagaaacaggatcattgtcattacataattttctataactgaacgatggttttcacatttaacactcaagtcaaatccatgttctaccaacacctttatcaagtcaacgtctacatttttggatttcatatagctgaatatattaaagttatttatgttgctaaatccagtggcttctagtagagccatcgctatatccttattaactttaacatgtctactatttgtgtattcttctaatggggtaagctgtctccaatttttgcgtaatggattagtgccactgtctagtagtagtttgacgacctcgacattattacaatgctcattaaaaaggtatgcgtgtaaagcattattcttgaattggttcctggtatcattaggatctctgtctttcaacatctgtttaagttcatcaagagccacctcctcattttccaaatagtcaaacattttgactgaatgagctactgtgaactctatacacccacacaactaatgtcattaaatatcatgtcaaaaacttgtacaattattaataaaaataatttagtgtttaaattttaccagttccagattttacacctccgttaatacctccattaaccccactggacgatcctcctccccacattccaccgccaccagatgtataagttttagatcctttattactaccatcatgtccatggataaagacactccacatgccgccactaccccctttagaagacatattaataagacttaaggacaagtttaacaataaaattaatcacgagtaccctactaccaacctacactattatatgattatagtttctatttttacagtaccttgactaaagtttctagtcacaagagcaatactaccaacctacactattatatgattatagtttctatttttataggaacgcgtacgagaaaatcaaatgtctaatttctaacggtagtgttgataaacgattgttatccgcggatacctcctctatcatgtcgtctattttcttactttgttctattaacttattagcattatatattatttgattataaaacttatattgcttattagcccaatctgtaaatatcggattattaacatatcgtttctttgtaggtttatttaacatgtacatcactgtaagcatgtccttaccatttattttaatttgacgcatatccgcaatttctttttcgcagtcggttataaattctatatatgatggatacatgctacatgtgtacttataatcgactaatatgaagtacttgatacatattttcagtaacgatttattattaccacctatgaataagtacctgtgatcgtctaggtaatcaactgttttcttaatacattcgatggttggtaatttactcagaataatttccaatatcttaatatataattctgctatttctgggatatatttatctgccagtataacacaaatagtaatacatgtaaacccatattttgttattatattaatgtctgcgccattatctattaaccattctactaggctgacactatgcgactcaatacaatgataaagtatactacatccatgtttatctattttgtttatatcatcaatatacggcttacaaagttttagtatcgataacacatccaactcacgcatagagaaggtagggaataatggcataatatttattaggttatcatcattgtcattatctacaactaagtttccattttttaaaatatactcgacaactttaggatctctattgccaaatttttgaaaatatttatttatatgcttaaatctatataatgtagctccttcatcaatcatacatttaataacattgatgtatactgtatgataagatacatattctaacaatagatcttgtatagaatctgtatatcttttaagaattgtggatattaggatattattacataaactattacacaattctaaaatataaaacgtatcacggtcgaataatagttgatcaactatataattatcgattttgtgatttttcttcctaaactgtttacgtaaatagttagatagaatattcattagttcatgaccactatagttactatcgaataacgcgtcaaatatttcccgtttaatatcgcatttgtcaagataataatagagtgtggtatgttcacgataagtataataacgcatctctttttcgtgtgaaattaaatagtttattacgtccaaagatgtagcataaccatcttgtgacctagtaataatataataatagagaactgttttacccattctatcatcataatcagtggtgtagtcgtaatcgtaatcgtctaattcatcatcccaattataatattcaccagcacgtctaatctgttctattttgatcttgtatccatactgtatgttgctacatgtaggtattcctttatccaataatagtttaaacacatctacattgggatttgatgttgtagcgtatttttctacaatattaataccatttttgatactatttatttctatacctttcgaaattagtaatttcaataagtctatattgatgttatcagaacatagatattcgaatatatcaaaatcattgatatttttatagtcgactgacgacaataacaaaatcacaacatcgtttttgatattattatttttcttggtaacgtatgcctttaatggagtttcaccatcatactcatataatggatttgcaccactttctatcaatgattgtgcactgctggcatcgatgttaaatgttttacaactatcatagagtatcttatcgttaaccatgattggttgttgatgctatcgcattttttggtttctttcatttcagttatgtatggatttagcacgtttgggaagcatgagctcatatgatttcagtactgtagtgtcagtactattagtttcaataagatcaatctctagatctatagaatcaaaacacgataggtcagaagataatgaatatctgtaggcttcttgttgtactgtaacttctggttttgttagatggttgcatcgtgctttaacgtcaatggtacaaattttatcctcgctttgtgtatcatattcgtccctactataaaattgtatattcagattatcatgcgatgtgtatacgctaacggtatcaataaacggagcacaccatttagtcataaccgtaatccaaaaatttttaaagtatatcttaacgaaagaagttgtgtcattgtctacggtgtatggtactagatcctcataagtgtatatatctagagtaatgtttaatttattaaatggttgataatatggatcctcgtgacaatttccgaagatggaaataagacataaacacgcaataaatctaattgcggacatggttactccttaaaaaaatacgaataatcaccttggctatttagtaagtgtcatttaacactatactcatattaatccatggactcataatctctatacgggattaacggatgttctatatacggggatgagtagttctcttctttaactttatactttttactaatcatatttagactgatgtatgggtaatagtgtttgaagagctcgttctcatcatcagaataaatcaatatctctgtttttttgttatacagatgtattacagcctcatatattacgtaatagaacgtgtcatctaccttattaactttcaccgcatagttgtttgcaaatacggttaatcctttgacctcgtcgatttccgaccaatctgggcgtataatgaatctaaactttaattgcttgtaatcattcgaaataatttttagtttgcatccgtagttatcccctttatgtaactgtaaatttctcaacgcgatatctccattaataatgatgtcgaattcgtgctgtatacccatactgaatggatgaacgaataccgacggcgttaatagtaatttactttttcatctttacatattgggtactagttttactatcataagtttataaattccacaagctactatggaataagccaaccatcttagtataccacacatgtcttaaagtttattaattaattacatgttgttttatatatatcgctacgaatttaaagagaaattagtttaggaagaaaaattatctatctacatcatcacgtctctgtattctacgatagagtgctactttaagatgcgacagatccgtgtcatcaaatatatactccattaaaatgattattccggcagcgaacttgatattggatatatcacaacctttgttaatatctacgacaatagacagcagtcccatggttccataaacagtgagtttatctttctttgaagagatattttgtagagatcttataaaactgtcgaatgacatcgcatttatatctttagctaaatcgtatatgttaccatcgtaatatctaaccgcgtctatcttaaacgtttccatcgctttaaagacgtttccgatagatggtctcatttcatcagtcatactgagccaacaaatataatcgtgtataacatctttgatagaatcagactctaaagaaaacgaatcggctttattatacgcattcatgataaacttaatgaaaaatgtttttcgttgtttaagttggatgaatagtatgtcttaataattgttattatttcattaattaatatttagtaacgagtacactctataaaaacgagaatgacataactaatcataactagttatcaaagtgtctaggacgcgtaattttcatatggtatagatcctgtaagcattgtctgtattctggagctattttctctatcgcattagtgagttcagaatatgttataaatttaaatcgaataacgaacataactttagtaaagtcgtctatattaactcttttattttctagccatcgtaataccatgtttaagatagtatattctctagttactacgatctcatcgttgtctagaatatcacatactgaatctacatccaattttagaaattggtctgtgttacatatctcttctatattattgttgatgtattgtcgtagaaaactattacgtagaccattttctttataaaacgaatatatagtactccaattatctttaccgatatatttgcacacataatccattctctcaatcactacatctttaagattttcgttgttaagatatttggctaaactatataattctattagatcatcaacagaatcagtatatatttttctagatccaaagacgaactctttggcgtcctctataatattcccagaaaagatattttcgtgttttagtttatcgagatctgatctgttcatatacgccatgattgtacggtacgttatgataaccgcataaaataaaaatccattttcatttttaaccaatactattcataattgagattgatgtaatactttgttactttgaacgtaaagacagtacacggatccgtatctccaacaagcacgtagtaatcaaatttggtgttgttaaacttcgcaatattcatcaatttagatagaaacttatactcatcatctgttttaggaatccatgtattattaccactttccaacttatcattatcccaggctatgtttcgtccatcatcgttgcgcagagtgaataattcttttgtattcggtagttcaaatatatgatccatgcatagatcggcaaagctattgtagatgtgatttttcctaaatctaatataaaactcgtttactagcaaacactttcctgatttatcgaccaagacacatatggtttctaaatctatcaagtggtggggatccatagttatgacgcagtaacatatattattacattcttgactgtcgctaatatctaaatatttattgttatcgtattggattctgcatatagatggcttgtatgtcaaagatatagaacacataaccaatttatagtcgcgctttacattctcgaatctaaagttaagagatttagaaaacattatatcctcggatgatgttatcactgtttctggagtaggatatattaaagtctttacagatttcgtccgattcaaataaatcactaaataatatcccacattatcatctgttagagtagtatcattaaatctattatattttatgaaagatatatcactgctcacctctatatttcgtacatttttaaactgtttgtataatatctctctgatacaatcagatatatctattgtgtcggtagacgataccgttacatttgaattaatggtgttccattttacaacttttaacaagttgaccaattcatttctaatagtatcaaactctccatgattaaatattttaatagtatccattttatatcactacggacacaaagtagctgacataaaccattgtataatttttatgttttatgtttattagcgtacacattttggaagttccggcttccatgtatttcctggagagcaagtagatgatgaggaaccagatagtttatatccgtacttgcacttaaagtctacattgtcgttgtatgagtatgatcttttaaacccgctagacaagtatccgtttgatattgtaggatgtggacatttaacaatctgacacgtgggtggatcggaccattctcctcctgaacacaggacactagagttaccaatcaacgaatatccactattgcaactataagttacaacgctcccatcggtataaaaatcctcgtatccgttatgtcttccgttggatatagatggaggggattggcatttaacagattcacaaataggtgcctcgggattccataccatagatccagtagatcctaattcacaatacgatttagattcaccgatcaactgatatccgctattacaagagtacgttatactagagccaaagtctactccaccaatatcaagttggccattatcgatatctcgaggcgatgggcatctccgtttaatacattgattaaagagtgtccatccagtacctgtacatttagcatatataggtcccattttttgctttctgtatccaggtagacatagatattctatagtgtctcctatgttgtaattagcattagcatcagtctccacactattcttaaatttcatattaatgggtcgtgacggaatagtacagcatgatagaacgcatcctattcccaacaatgtcaggaacgtcacgctctccaccttcatatttatttatccgtaaaaatgttatcctggacatcgtacaaataataaaaagcccatatatgttcgctattgtagaaattgtttttcacagttgctcaaaaacgatggcagtgacttatgagttacgttacactttggagtctcatctttagtaaacatatcataatattcgatattacgagttgacatatcgaacaaattccaagtatttgattttggataatattcgtattttgcatctgctataattaagatataatcaccgcaagaacacacgaacatctttcctacatggttaaagtacatgtacaattctatccatttgtcttccttaactatatatttgtatagataattacgagtctcgtgagtaattccagtaattacatagatgtcgccgtcgtactctacagcataaactatactatgatgtctaggcatgggagacttttttatccaacgatttttagtgaaacattccacatcgtttaatactacatatttctcatacgtggtataaactccacccattacatatatatcatcgtttacgaataccgacgcgcctgaatatctaggagtaattaagtttggaagtcttatccatttcgaagtgccgtgtttcaaatattctgccacacccgttgaaatagaaaattctaatcctcctattacatataactttccatcgttaacacaagtactaacttctgattttaacgacgacatattagtaaccgttttccattttttcgttttaagatctacccgcgatacggaataaacatgtctattgttaatcatgccgccaataatgtatagacaattatgtaaaacatttgcattatagaattgtctatctgtattaccgactatcgtccaatattctgttctaggagagtaatgggttattgtggatatataatcagagtttttaatgactactatattatgttttataccatttcgtgtcactggctttgtagatttggatatagttaatcccaacaatgatatagcattgcgcatagtattagtcataaacttgggatgtaaaatgttgatgatatctacatcgtttggatttttatgtatccactttaataatatcatagctgtaacatcctcatgatttacgttaacgtcttcgtgggataagatagttgtcagttcatcctttgataattttccaaattctggatcggatgtcaccgcagtaatattgttgattatttctgacatcgacgcattatatagttttttaattccatatcttttagaaaagttaaacatccttatacaatttgtgaaattaatattatgaatcatagtttttacacatagatctactacaggcggaacatcaattattatggcagcaactagtatcatttctacattgtttatggtgatgtttatcttcttccagcgcatatagtctaatagcgattcaaacgcgtgatagtttataccattcaatataatcgcttcatcctttagatggtgatcctgaatgcgtttaaaaaaattatacggagacgccgtaataatttccttattcacttgtataatttccccattgatagaaaatattacgctttccattcttaaagtactataagtaattatagtataatgtaaacgtttatatattcaatatttttataaaaatcattttgacattaattcctttttaaatttccgtctatcatctatagaaacgtattctatgaatttataaaatgcttttacgtgtcctatcgtaggcgatagaaccgctaaaaagcctatcgaatttctacaaaagaatctgttatatggtatagggagagtataaaacattaaatgtccgtacttattaaagtattcagtagccaatcctaactctttcgaatacttattaatggctcttgttctgtacgaatctatttttttgaacaacggacctagtggtatatcttgttctatgtatctaaaataatgtctgactagatccgttagtttaatatccgcagtcatcttgtctagaatggcaaatctaactgcgggtttaggctttagtttagtttctatatctacatctatgtctttatctaacaccaaaaatataatagctaatattttattacaatcatccggatattcttctacgatctcactaactaatgtttctttggttatactagtatagtcactatcggacaaataaagaaaatcagatgatcgatgaataatacatttaaattcatcatctgtaagatttttgagatgtctcattagaatattattagggttagtactcattatcattcggcagctattacttattttattatttttcaccatatagatcaatcattagatcatcaaaatatgtttcaatcatcctaaagagtatggtgaatgactcttcccatctaatttctgaacgttcaccaatgtctctagccactttggcactaatagcgatcattcgcttagcgtcttctatattattaactggttgatttaatctatctagcaatggaccgtcggacagcgtcattctcatgttcttaatcaatgtacatacatcgccgtcatctaccaattcatccaacaacataagctttttaaaatcatcattataataggtttgatcgttgtcatttctccaaagaatatatctaataagtagagtcctcatgcttagttaacaactattttttatgttaaatcaattagtacaccgctatgtttaatacttattcatattttagtttttaggattgagaatcaatacaaaaattaatgcatcattaattttagaaatacttagtttccacgtagtcaatgaaacatttgaactcatcgtacaggacgttctcgtacaggacgtaactataaaccggtttatatttgttcaagatagatacaaatccgataactttttttacgaattctacgggatccactttaaaagtgtcataccgggttctttttatttttttaaacagatcaatggtgtgatgttgattaggtcttttacgaatttgatatagaatagcgtttacatattctccataatggtcaatcgccatttgttcgtatgtcataaattctttaattatatgacactgtgtattatttagttcatccttgttcattgttaggaatctatccaaaatggcaattatactagaactataggtgcgttgtatacacatattgatgtgtctgtttatacaatccatgatatttggatccatgctactaccttcgggtaaaattgtagcatcatataccatttctagtactttaggttcattattatccattgcagaggacgtcatgatcgaatcataaaaaaatatattatttttatgttattttgttaaaaataatcatcgaatacttcgtaagatactccttcatgaacataatcagttacaaaacgtttatatgaagtaaagtatctacgatttttacaaaagtccggatgcataagtacaaagtacgcgataaacggaataataatagatttatctagtctatctttttctatagctttcatagttagatacatggtctcagaagtaggattatgtaacatcagcttcgataaaatgactgggttatttagtcttacacattcgctcatacatgtatgaccgttaactacagagtctacactaaaatgattgaacaatagatagtctaccattgtttcgtattcagatagtacagcgtagtacatggcatcttcacaaattatatcattgtctaatagatatttgacgcatcttatggatcccacttcaacagccatcttaaaatcatattgctttcctttatcattaataatttctagaacatcatctctatcataaaagatacaaatattaactgtttgatccgtaataacattgctagtcaatagcaatttgttaataagatgcgctgggctcaatgtcttaataagaagtgtaagaggactatctccgaatttgttttgtttattaacatccgttgatggaagtaaaagatctataatgtctacattcttgactgttttagagcatacaatatggagaggtgtatttccatcatgatctggttttgagggactaattcctagtttcatcatccatgagattgtagaagcttttggattgtctgacataagatgtctatgaatatgatttttgccaaatttatccactatcctggcttcgaatccgatggacattatttttttaaacactctttctgaaggatctgtacacgccaacaacggaccacatccttcttcatcaaccgagttgttaatcttggctccatactgtaccaataaatttattctctctatgacttcatcatctgttcccgagagataatatagaggtgttttatgctgtttatcacacgcgtttggatctgcgccgtgcgtcagcagcatcgcgactattctattattattaattttagaagctatatgcaatggataatttccatcatcatccgtctcatttggagagtatcctctatgaagaagttcttcgacaaatcgttcatctagtcctttaattccacaatacgcatgtagaatgtgataattatttccagaaggttcgatagcttgtagcatattcctaaatacatctaaatttttactattatatttggcataaagagatagataatactcggccgacataatgttgtccattgtagtataaaaattaatatttctatttctatttctgtatatttgcaacaatttactctctataacaaatatcataacttagtttttttatgtcaagaaggcactggtttagttcatctataaatgtcacgccataactaccacgcatgccatactcagaattatgataaagatatttatccttggggtgtaggtaatggggattaatctttgttggatcagtctctaagttaacacatgtcacacatgatccatttatagttatatcacacgatgatgatttatgaattgattccggaagatcgctatcgtattttgtggttccacaattcatttccatacatgttattgtcacactaatattatgatgaactttatctagccgctgagtggtaaacaacagaacagatagtttattatctttaccaacaccctcagccgctgccacaaatctctgatccgtatccatgatggtcatgtttatttctagtccgtatccagtcaacactatgttagcatttctgtcgatatagctttcactcatatgacactcaccaataatagtagaattaatgtcgtaatttacaccaatagtgagttcggcggcaaagtaccaataccggtaatcttgtcgaggaggacatatagtattcttgtattctaccgaatacccgagagatgcgatacaaaagagcaagactaatttgtaaaccatcttactcaaaatatgtaacaatagtacgatgcaatgagtaagacaataggaaatctatcttatatacacataattattctatcaattttaccaattagttagtgtaatgttaacaaaaatgtgggagaatctaattagtttttctttacacaattgacgtacatgagtctgagttccttgtttttgctaattatttcatccaatttattattcttgacgatatcgagatcttttgtataggagtcaaacttgtattcaacatgcttttctataatcattttagctatttcggcatcatccaatagtacattttccagattagcagaatagatattaatgtcgtatttgaacagagcctgtaacatctcaatgtctttattatctatagccaatttaatgtccggaatgaagagaagggaattattggtgtttgtcgacgtcatatagtcgagcaagagaatcatcatatccacgtgtccattttttatagtgatgtgaatacaactaaggagaatagccagatcaaaagtagatggtatctctgaaagaaagtaggaaacaatacttacatcattaagcatgacggcatgataaaatgaagttttccatccagttttcccatagaacatcagtctccaatttttcttaacaaacagttttaccgtttgcatgttaccactatcaaccgcataatacaatgcggtgtttcccttgtcatcaaattgtgaatcatccagtccactgaatagcaaaatctttactattttggtatcttccaatgtggctgcctgatgtaatggaaattcattctctagaagatttttcaatgctccagcgttcaacaacgtacatactagacgcacgttattatcagctattgcataatacaaggcactatgtccatggacatccgccttaaatgtatctttactagagagaaagcttttcagctgcttagacttccaagtattaattcgtgacagatccatgtctgaaacgagacgctaattagtgtatattttttcattttttataattttgtcatattgcaccagaattaataatatctttaatagatctgattagtagatacatggctatcgcaaaacaacatatacacatttaataaaaataatatttattaagaaaattcagatttcacgtacccatcaatataaataaaataatgattccttacaccgtacccatattaaggagattccaccttacccataaacaatataaatccagtaatatcatgtctgatgatgaacacaaatggtgtattaaattccagtttttcaggagatgatctcgccgtagctaccataatagtagatgcctctgctacagttccttgttcgtcgacatctatctttgcattctgaaacattttataaatatataatgggtccctagtcatatgtttaaacgacgcattatctggattaaacatactaggagccatcatttcggctatcgacttaatatccctcttattttcgatagaaaatttagggagtttaagattgtacactttattccctaattgagacgaccaatagtctaattttgcagccgtgatagaatctgtgaaatgggtcatattatcacctattgccaggtacatactaatattagcatccttatacggaaggcgtaccatgtcatattctttgtcatcgattgtgattgtatttccttgcaatttagtaactacgttcatcatgggaaccgttttcgtaccgtacttattagtaaaactagcattgcgtgttttagtgatatcaaacggatattgccatatacctttaaaatatatagtattaatgattgcccatagagtattattgtcgagcatattagaatctactacattagacataccggatctacgttctactatagaattaattttattaaccgcatctcgtctaaagtttaatctatataggccgaatctatgatattgttgataatacgacggtttaatgcacacagtattatctacgaaactttgataagttagatcagtgtacgtatatttagatgttttcagcttagctaatcctgatattaattctgtaaatgctggacccagatctctttttctcaaatccatagtcttcaataattctattctagtattacctgatgcaggcaatagcgacataaacatagaaaacgaataaccaaacggtgagaagacaatattatcatcttgaatatttttatacgctactataccggcattggtaaatccttgtagacgataggcggacgctgaacacgctaacgatagtatcaataacgcaatcatgattttatggtattaataattaaccttatttttatgttcggtataaaaaaattattgatgtctacacatccttttgtaattgacatctatatatccttttgtataatcaactctaatcactttaacttttacagttttccctaccagtttatccctatattcaacatatctatccatatgcatcttaacactctctgccaagatagcttcagagtgaggatagtcaaaaagataaatatatagagcataatcattctcgtatactctgccctttattacatcacccgcattgggcaacgaataacaaaatgcaagcatcttgttaacgggctcgtaaattgggataaaaattatgtttttattgtcttatatctattttattcaagagaatattcaggaatttctttttccggttgtatctcgtcgcagtatatatcatttgtacattgtttcatattttttaatagtttacaccttttagtaggactagtatcgtacaattcatagctgtattttgaattccaatcacgcataaaaatatcttccaattgttgacgaagacctaatccatcatccggtgtaatattaatagatgctccacatgtatccgtaaagtaatttcctgtccaatttgaggtacctatataggccgttttatcggttaccatatatttggcatggtttaccctagaatacggaatgggaggatcagcatctggtacaataaatagctttacttctatatttatgtttttagattttagcatagcgatagatcttaaaaagtttctcatgataaacgaagatcgttgccagcaactaatcaatagcttaacggatacttgtctgtctatagcggatcttcttaattcatcttctatataaggccaaaacaaaattttacccgccttcgaataaataatagggataaagttcataacagatacataaacgaatttactcgcatttctaatacatgacaataaagcggttaaatcattggttctttccatagtacatagttgttgcggtgcagaagcaataaatacagagtgtggaacgccgcttacgttaatactaagaggatgatctgtattataatacgacggataaaagtttttccaattatatggtagattgttaactccaagataccagtatacctcaaaaatttgagtgagatccgctgccaagttcctattattgaagatcgcaatacccaattccttgacctgagttagtgatctccaatccatgttagcgcttcctaaataaatatgtgtattatcagatatccaaaattttgtatgaagaactcctcctaggatatttgtaatatctatgtatcgtacttcaactccggccatttgtagtctttcaacatcctttaatggtttgttagatttattaacggctactctaactcgtactcctcttttgggtaattgtacaatctcgtttaatattatcgtgccgaaattcgtacccacttcatccgataaactccaataaaaagatgatatatctagtgtttttgtggtattggatagaatttccctccacatgttaaatgtagacaaatatactttatcaaattgcatacctataggaatagtttctgtaatcactgcgattgtattatccggattcattttatttgttaaaagaataatcctatatcacttcactctattaaaaatccaagtttctatttctttcatgactgattttttaacttcatccgtttccttatgaagatgatgtttggcaccttcataaatttttatttctctattacaatttgcatgttgcatgaaataatatgcacctaaaacatcgctaatcttattgtttgttccctggagtatgagagtcggggggtgttaatcttggaaattatttttctaaccttgttggtagccttcaagacctgactagcaaatccagccttaattttttcatgattgactaatgggtcgtattggtatttataaactttatccatatctctagatactgattctggacatagctttccgactggcgcatttggtgtgatggttcccataagtttggcagctagcagattcagtcttgaaacagcatctgcattaactagaggagacattagaatcattgctgtaaacaagtttggattatcgtaagaggctagctcccatggaatgacccaataagtagatttaatagttaccacgtgctgtaccaaagtcatcaatcatcattttttcaccattacttcttccatgtccaatatgatcatgtgagaatactaaaattcctaacgatgatatgttttcagctagttcgtcataacgtccagaatgtttaccagctccatgacttatgaatactaatgccttaggatatgtaataggtttccaatatttacaatatatgtaatcattgtccagattgaacatacagtttgcactcatgattcacgttatataactatcaatattaacagttcgtttgatgatcatattatttttatgttttattgataattgtaaaaacatacaattaaatcaatatagaggaaggagacggctactgtcttttgtaagatagtcatggcgactaaattagattatgaggatgctgttttttactttgtggatgatgataaaatatgtagtcgcgactccatcatcgatctaatagatgaatatattacgtggagaaatcatgttatagtgtttaacaaagatattaccagttgtggaagactgtacaaggaattgatgaagttcgatgatgtcgctatacggtactatggtattgataaaattaatgagattgtcgaagctatgagcgaaggagaccactacatcaattttacaaaagtccatgatcaggaaagtttattcgctaccataggaatatgtgctaaaatcactgaacattggggatacaaaaagatttcagaatctagattccaatcattgggaaacattacagatttgatgaccgacgataatataaacatcttgatactttttctagaaaaaaaattgaattgatgatataggggtcttcataacgcataattattacgttagcattctatatccgtgttaaaaaaaattatcctatcatgtatttgagagttttatatgtagcaaacatgatagctgtgatgccaataagctttagatattcacgcgtgctagtgttagggatggtattatctggtggtgaaatgtccgttatataatctacaaaacaatcatcgcatatagtatgcgatagtagagtaaacatttttatagtttttactggattcatacatcgtctacccaattcggttataaatgaaattgtcgccaatcttacacccaaccccttgttatccattagcatagtattaacttcgttatttatgtcataaactgtaaatgattttgtagatgccatatcatacatgatattcatgtccctattataatcattactaactttatcacaatatatgttgataatatctatatatgatctagtctttgtgggcaactgtctatacaagtcgtctaaacgttgtttactcatatagtatcgaacagccatcattacatggtcccgttccgttgatagataatcgagtatgttagtggacttgtcaaatctatataccatattttctggaagtggatatacatagtcgtgatcaacattattgctagcctcatcttctatatcctgtactataccattatctatatcatctacataatctatgatattattacacataaacatcgacaacatactattgtttattatctaagtcctgttgatccaaacccttgatctcctctatttgtactatctagagattgtacttcttccagttctggataatatatacgttgatagattagctgagctattctatctccagtatttacattaaacgtacattttccattattaataagaatgactcctatgtttcccctataatcttcgtctattacaccacctcctatatcaatgccttttagtgacagaccagacctaggagctattctaccatagcagaacttaggcatggacatactaatatctgtcttaattaactgtctttctcctggagggatagtataatcgtaagcgctatacaaatcatatccggcagcacccggcgattgcctagtaggagatttagctctgttagtttccttaacaaatctaactggtgagttaatattcatgttgaacataaaactaatattttatttcaaaattatttaccatcccatatattccatgaataagtgtgatgattgtacacttctatagtatctatatacgatccacgataaaatcctcctatcaatagcagtttattatccactatgatcaattctggattatccctcggataaataggatcatctatcagagtccatgtattgctggattcacaataaaattccgcatttctaccaaccaagaataaccttctaccgaacactaacgcgcatgatttataatgaggataataagtggatggtccaaactgccactgatcatgattgggtagcaaatattctgtagttgtatcagtttcagaatgtcctcccattacgtatataacattgtttatggatgccactgctggattacatctaggtttcagaagactcggcatattaacccaagcagcatccccgtggaaccaacgctcaacagatgtgggatttggtagacctcctactacgtataatttattgttagcgggtatcccgctagcatacagtctggggctattcatcggaggaattggaatccaattgtttgatatataatttacagctatagcattgttatgtatttcattgttcatccatccaccgatgagatatactacttctccaacatgagtacttgtacacatatggaatatatctataatttgatccatgttcataggatactctatgaatggatacttgtatgatttgcgtggttgtttatcacaatgaaatattttggtacagtctagtatccattttacattatttatacctctgggagaaagataatttgacctgattacatttttgataaggagtagcagatttcctaatttatttcttcgcctcatataccacttaatgacaaaatcaactacataatcctcatctggaacatttagttcatcgctttctagaataagtttcatagatagataatcaaaattgtctatgatgtcatcttccagttccaaaaagtgtttggcaataaagtttttagtatgacataagagattggatagtccgtattctatacccatcatgtaacactcgacacaatattcctttctaaaatctcgtaagataaagtttatacaagtgtagatgataaattctacagaggttaatatagaagcacgtaataaattgacgacgttatgactatctatatatacctttccagtatatgagtaaataactatagaagttaaactgtgaatgtcaaggtctagacaaacccttgtaactggatctttatttttcgtgtatttttgacgtaaatgtgtgcgaaagtaaggagataactttttcaatatcgtagaattgactattatattgcctcctatggcatcaataattgttttgaatttcttagtcatagacaatgctaatatattcttacagtacacagtattgacaaatatcggcatttatgtttctttaaaagtcaacatctagagaaaaatgattatctttttgagacataactcccattttttggtattcacccacacgtttttcgaaaaaattagtttttccttccaatgatatattttccatgaaatcaaacggattggtaacattataaatttttttaaatcccaattcagaaatcaatctatccgcgacgaattctatatatgttttcatcatttcacaattcattcctataagtttaactggaagagccgcagtaagaaattcttgttcaatggatactgcatctgttataatagatctaacggtttcttcactcggtggatgcaataaatgtttaaacatcaaacatgcgaaatcgcagtgcagaccctcgtctctactaattagttcgttggaaaacgtgagtccgggcattaggccacgctttttaagccaaaatatggaagcgaatgatccagaaaagaaaattccttctactgcagcaaaggcaataagtctctctccataaccggcgctgtcatgtatccacttttgagcccaatcggccttcttttttacacaaggcatcgtttctatggcattaaagagatagtttttttcattactatctttaacataagtatcgatcaaaagactatacatttccgaatgaatgttttcaatggccatctgaaatccgtagaaacatctagcctcggtaatctgtacttctgtacaaaatcgttccgccaaattttcattcactattccgtcactggctgcaaaaaacgccaatacatgttttataaaatatttttcgtctggtgttagtttattccaatcattgatatctttagatatatctacttcttccactgtccaaaatgatgcctctgcctttttatacatgttccagatgtcatgatattggattgggaaaataacaaatctatttggatttggtgcaaggatgggttccataactaaattaacaataacaataaattttttttcagttatctatatgcctgtacttggattttttgtacatcgatatcgccgcaatcactacaataattacaagtattattgatagcattgttattagtactatcataattaaattatctacattcatgggtgctgaataatcgttattatcatcattatcattttgtaattgtgacatcatactagataaatcgtttgcgagattgttgtgggaagcgggcatggaggatgcattatcattattatttaacgccttccatttggattcacaaatgttacgcacattcaacattttatggaaactataattttgtgaaaacaaataacaagaaaactcgtcatcgttcaaatttttaacgatagtaaaccgattaaacgtcgagctaatttctaacgctagcgactctgttggatatgggtttccagatatatatcttttcagttcccctacgtatctataatcatctgtaggaaatggaagatatttccatttatctactgttcctaatatcatatgtggtggtgtagtagaaccattaagcgcgaaagatgttatttcgcatcgtattttaacttcgcaataatttctggttagataacgcactctaccagtcaagtcaatgatattagcctttacagatatattcatagtagtcgtaacgatgactccatcttttagatgcgatactcctttgtatgtaccagaatcttcgtacctcaaactcgatatatttaaacaagttaatgagatattaacgcgttttatgaatgatgatatataaccagaagttttatcctcggtggctagcgctataaccttatcattataataccaactagtgtgattaatatgtgacacgtcagtgtgggtacaaatatgtacattatcgtctacgtcgtattcgatacatccgcatacagccaacaaatataaaatgacaaatactctaacgccgttcgtacccatcttgatgcggtttaataaatgttttgatttcaatttattgtaaaaaaagattcggttttatactgttcgatattctcattgcttatattttcatctatcatctccacacagtcaaatccgtggttagcatgcacctcatcaaccggtaaaagactatcggactcttctatcattataactctagaatatttaatttggtcattattaatcaagtcaattatcttatttttaacaaacgtgagtattttactcattttttataaaaacttttagaaatatacagactctatcgtgtgtctatatcttctttttatatccaatgtatttatgtctgatttttcttcatttatcatatataatggtccaaattctacacgtgcttcggattcatccagatcattaaggttcttataattgtaacatccttctcttccctcttctacatcttccttcttattcttattcttagcgtcacagaatctaccacagcaggatcccatgacgagcgtcatattaaactaatccattttcaattataatatatgattagtaatgaccattaaaataaaaaatattcttcataaccggcaagaaagtgaaaagttcacattgaaactatgtcagtagtatacatcatgaaatgatgatatatatatactctattttggtggaggattatatgatataattcgtggataatcatttttaagacacatttctttattcgtaaatcttttcacgttaaatgagtgtccatattttgcaatttcttcatatgatggcggtgtacgtggacgaggctgctcctgttcttgttgtggtcgccgactgtcgtgtctgcgtttagatccctccattatcgcgattgcgtagatggagtactattttataccttgtaattaaatttttttattaattaaacgtataaaaacgttccgtatctgtatttaagagccagatttcgtctaatagaacaaatagctacagtaaaaataactagaataattgctacacccactagaaaccacggatcgtaatacggcaatcggttttcgataataggtggaacgtatattttatttaaggacttaacaattgtctgtaaaccacaatttgcttccgcggatcctgtattaactatctgtaaaagcatatgttgaccgggcggagccgaacattctccgatatctaatttctgtatatctataatattattaacctccgcatacgcattacagttcttttctagcttggataccgcactaggtacatcgtctagatctattcctatttcctcagcgatagctcttctatccttttccggaagcaatgaaatcacttcaataaatgattcaaccatgagtgtgaaactaagtcgagaattactcatgcatttgttagttattcggagcgcgcaatttttaaactgtcctataacctctcctatatgaatagcacaagtgacattagtagggatagaatgttgagctaatttttgtaaataactatctataaaaagattatacaaagttttaaactctttagtttccgccatttatccagtctgagaaaatgtctctcataataaatttttccaagaaactaattgggtgaagaatggaaacctttaatctatatttatcacagtctgttttggtacacatgatgaattcttccaatgccgtactaaattcgatatctttttcgatttctggatatgtttttaataaagtatgaacaaagaaatggaaatcgtaataccagttatgtttaactttgaaattgttttttattttcttgttaatgattccagccacttgggaaaagtcaaagtcgtttaatgccgatttaatacgttcattaaaaacaaactttttatcctttagatgaattattattggttcattggaatcaaaaagtaagatattatcgggtttaagatctgcgtgtaaaaagttgtcgcaacagggtagttcgtagattttaatgtataacagagccatctgtaaaaagataaactttatgtattgtaccaaagatttaaatcctaatttgatagctaactcggtatctactttatctgccgaatacagtgctaggggaaaaattataatgtttcctctttcatattcgtagttagttctcttttcatgttcgaaaaagtgaaacatgcggttaaaatagtttataacattaatattactgttaataactgccggataaaagtgggatagtaatttcacgaatttgatactgtcctttctctcgttaaacgcctttaaaaaaactttagaagaatatctcaatgagagttcctgaccatccatagtttgtatcaataatagcaacatatgaagaacacgtttatacagagtatgtaaaaatgttaatttatagtttaatcccatggcccacgcacacacgattaattttttttcatctccctttagattgttgtatagaaatttgggtactgtgaactccgccgtagtttccatgggactatataattttgtggcctcgaatacaaattttactacatagttatctatcttaaagactataccatatcctcctgtagatatgtgataaaaatcgtcgtttataggataaaatcgtttatccttttgttggaaaaaggatgaattaatgtaatcattctcttctatctttagtagtgtttccttattaaaattcttaaaataatttaacaatctaactgacggagcccaattttggtgtaaatctaattgggacattatattgttaaaatacaaacagtctcctaatataacagtatctgataatctatggggagacatccattgatattcaggggatgaatcattggcaacacccatttattgtacaaaaagccccaatttacaaacgaaagtccaggtttgatagagacaaacaattaactattttgtctctgtttttaacacctccacagtttttaatttctttagtaatgaaattattcacaatatcagtatcttctttatctaccagagattttactaacttgataaccttggctgtctcattcaatagggtagtaatatttgtatgtgtgatattgatatctttttgaattgtttcttttagaagtgattctttgatggtgccagcatacgaattacaataatgcagaaactcggttaacatgcaggaattatagtaagccaattccaattgttgcctgtgttgtattagagtgtcaatatgagcaatggtgtccttgcgtttctctgatagaatgcgagcagcgattttggcgttatcatttgacgatatttctggaatgacgaatcctgtttctactaactttttggtaggacaaagtgaaacaatcaagaagatagcttctcctcctatttgtggaagaaattgaactcctctagatgatctactgacgatagtatctccttgacagatattggaccgaattacagaagtacctggaatgtaaagccctgaaaccccctcattttttaagcagattgttgccgtaaatcctgcactatgcccaagatagagagctcctttggtgaatccatctctatgtttcagtttaaccaagaaacagtcagctggtctaaaatttccatctctatctaatacagcatctaacttgatgtcaggaactatgaccggtttaatgttatatgtaacattgagtaaatccttaagttcataatcatcactgtcatcagttatgtacgatccaaacaatgtttctaccggcatagtggatacgaagatgctatccatcagaatgtttccctgattagtattttctatatagctattcttctttaaacgattttccaaatcagtaactatgttcatttttttaggagtaggacgcctagccagtatggaagaggattttctagatcctctcttcaacatctttgatctcgatggaatgcaaaaccccatagtgaaacaaccaacgataaaaataatattgtttttcactttttataattttaccatctgactcatggattcattaatatctttataagagctactaacgtataattctttataactgaactgagatatatacaccggatctatggtttccataattgagtaaatgaatgctcggcaataactaatggcaaatgtatagaacaacgaaattatactagagttgttaaagttaatattttctatgagctgttccaataaattatttgttgtgactgcgttcaagtcataaatcatcttgatactatccagtaaaccgtttttaagttctggaatattatcatcccattgtaaagcccctaattcgactatcgaatatcctgctctgatagcagtttcaatatcgacggacgtcaatactgtaataaaggtggtagtattgtcatcatcgtgataaactacgggaatatggtcgttagtaggtacggtaactttacacaacgcgatatataactttccttttgtaccatttttaacgtagttgggacgtcctgcagggtattgttttgaagaaatgatatcgagaacagatttgatacgatatttgttggattcctgattattcactataatataatctagacagatagatgattcgataaatagagaaggtatatcgttggtaggataatacatccccattccagtattctcggatactctattgatgacactagttaagaacatgtcttctattctagaaaacgaaaacatcctacatggactcattaaaacttctaacgctcctgattgtgtctcgaatgcctcgtacaaggatttcaaggatgccatagattctttgaccaacgatttagaattgcgtttagcatctgatttttttattaaatcgaatggtcggctctctggtttgctaccccaatgataacaatagtcttgtaaagataaaccgcaagaaaatttatacgcatccatccaaataaccctagcaccatcggatgatattaatgtattattatagattttccatccacaattattgggccagtatactgttagcaacggtatatcgaatagattactcatgtaacctactagaatgatagttcgtgtactagtcataatatctttaatccaatctaaaaaatttaaaattagattttttacactgttaaagttaacaaaagtattacccgggtacgtggatatcatatatggcattggtccattatcagtaatagctccataaactgatacggcgatggtttttatatgtgtttgatctaacgaggaagaaattcgcgcccacaattcatctctagatatgtatttaatatcaaacggtaacacatcaatttcgggacgcgtatatgtttctaaatttttaatccaaatataatgatgacctatatgccctattatcatactgtcaactatagtacacctagggaacttacgatacatctgtttcctataatcgttaaattttacaaatctataacatgctaaaccttttgacgacagccattcattaatttctgatatggaatctgtattctcgataccgtatcgttctaaagccagtgctatatctccctgttcgtgggaacgctttcgtataatatcgatcaacggataatctgaagtttttggagaataatatgactcatgatctatttcgtccataaacaatctagacataggaattggaggcgatgatcttaattttgtgcaatgagtcgtcaatcctataacttctaatcttgtaatattcatcatcgacataatactatctatgttatcatcgtatattagtataccatgaccttcttcatttcgtgccaaaatgatatacagtcttaaatagttacgcaatatctcaatagtttcataattgttagctgttttcatcaaggtttgtatcctgtttaacatgatggcgttctataacgtctctattttctatttttaattttttaaatttttaacgatttactgtggctagatacccaatctctctcaaatatttttttagcctcgcttacaagctgtttatctatactattaaaactgacgaatccgtgattttggtaatgggttccgtcgaaatttgccgaagtgatatgaacatattcgtcgtcgactatcaacaattttgtattattctgaatagtgaaaaccttcacagatagatcattttgaacacacaacgcatctagacttttggcggttgccatagaatatacgtcgttcttatcccaattaccaactagaagtctgatcttaactcctctattaatggctgcttctataatggagttgtaaatgtcgggccaatagtagctattaccgtcgacacgtgtagtgggaactatggccaaatgttcaatatctatactagtcttagctgacctgagtttatcaataactacatcggtatctagatctctagaatatcccaataggtgttccggagaatcagtaaagaacactccacctataggattcttaatatgatacgcagtgctaactggcaaacaacaagccgcagagcataaattcaaccatgaattttttgcgctattaaaggctttaaaagtatcaaatcttctacgaagatctgtggccagcgggggataatcagaatatacacctaacgttttaatcgtatgtatagatcctccagtaaatgacgcgtttcctacataacatctttcatcatctgacacccaaaaacaaccgagtagtagtcccacattattttttttatctatattaacggttataaaatttatatccgggcagtgactttgtagctctcccagatttcttttccctcgttcatctagcaaaactattattttaatccctttttcagatgcctcttttagtttatcaaaaataagcgctcccctagtcgtactcagaggattacaacaaaaagatgctatgtatatatatttcttagctagagtgataatttcgttaaaacattcaaatgttgttaaatgatcggatctaaaatccatattttctggtagtgtttctaccagcctacattttgctcccgcaggtaccgatgcaaatggccacatttagttaacataaaaacttatacatcctgttctatcaacgattctagaatatcatcggctatatcgctaaaattttcatcaaagtcgacatcacaacctaactcagtcaatatattaagaagttccatgatgtcatcttcgtctatttctatatccgtatccattgtagattgttgaccgattatcgagtttaaatcattactaatactcaatccttcagaatacaatctgtgtttcattgtaaatttataggcggtgtatttaagttggtagattttcaattatgtattaatatagcaacagtagttcttgctcctccttgattctagcatcctcttcattattttcttctacgtacataaacatgtccaatacgttagacaacacaccgacgatggcggccgcaggatcctcaagagccagactcacatttcagctgcttttccaggccacagatgatcagttccaggccaaaaaggaatgcaggctcagccccttggtggtcaaacaactcaatagcttgccgcagcagtggtggcatggagtcagtggtgggggtctccctctcctccttggcaacttggtgctcctggtcctccagcacacagcccaaggtgaagtggcccacagcagagagggcatacaaggcattttccagggagaagccttgttggcacaggaatgccagctggttctccagggtctcatactgcttctctgtaggcctggtgcccaagtgaactttggcaccatcccggtgggagagcaaggcacatctgaagctcttggcattgttcctcaggaagtcctgccaggactccccttccagagggcagaagtgggtgtggtgcctgtccaacatctcaatggccagggcatcaagcagagccctcttgttcttcacatgccagtacagggtaggctgctccacacccagcttctgggccagcttcctggtggtcaagccctcaatgccaacttcattcaggagctccaaggcagagttgatgactttgctcttgtccagtctggacatctcgacttcgagcttatttatattccaaaaaaaaaaaataaaatttcaatttttaagcttacagacacgaatatgactaaaccgatgaccatttaaaaacccctctctagctttcacttaaactgtatcgatcattcttttagcacatgtataatataaaaacattattctatttcgaatttaggcttccaaaaatttttcatccgtaaaccgataataatatatatagacttgttaatagtcggaataaatagattaatgcttaaactatcatcatctccacgattagagatacaatatttacattctttttgctgtttcgaaactttatcaatacacgttaatacaaacccaggaaggagatattgaaactgaggctgttgaaaatgaaacggtgaatacaataattcagataatgtaaaatcatgattccgtattctgatgatattagaactgctaatggatgtcgatggtatgtatctaggagtatctattttaacaaagcatcgatttgctaatatacaattatccttttgattaattgttattttattcatattcttaaaaggtttcatatttatcaattcttctacattaaaaatttccatttttaatttatgtagccccgcaatactcctcattacgtttcattttttgtctataatatccattttgttcatctcggtacatagattatccaattgagaagcgcatttagtagttttgtacattttaagtttattgacgaatcgtcgaaaactagttatagttaacattttattatttgataccctgatattaatacccctgccgttactattatttataactgatgtaatccacgtaacattggaattaactatcgatagtaatgcatcgacgcttccaaaattgtctattataaactcaccgataatttttttattgcatgttttcatattcattaggattatcaaatctttaatcttattacgattgtatgcgttgatattacaagacgtcattctaaaagacggaggatctccatcaaatgccagacaatcacgtacaaagtacatggaaataggttttgttctattgcgcatcatagatttatatagaacacccgtagaaatactaatttgttttactctataaaatactaatgcatctatttcatcgttttgtataacgtctttccaagtgtcaaattccaaatttttttcattgatagtaccaaattcttctatctctttaactacttgcatagataggtaattacagtgatgcctacatgccgttttttgaaactgaatagatgcgtctagaagcgatgctacgctagtcacaatcaccactttcatatttagaatatatatatgtaaaaatatagtagaatttcattttgtttttttctatgctataaatgaattctcattttgcatctgctcatactccgttttatattaataccaaagaaggaagatatctggttctaaaagccgttaaagtatgcgatgttagaactgtagaatgcgaaggaagtaaagcttcctgcgtactcaaagtagataaaccctcatcgcccgcgtgtgagagaagaccttcgtccccgtccagatgcgagagaatgaataaccctggaaaacaagttccgtttatgaggacggacatgctacaaaatatgttcgcggctaatcgcgataatgtagcttctagacttttgtcctaaaatactattatatccttttcgatattaataaatccgtgtcgtccaggttttttatctctttcagtatgtgaatagataggtattttatctctattcatcatcgaatttaagagatccgataaacattgtttgtattctccagatgtcagcatctgatacaacaatatatgtgcacataaacctctggcacttatttcatgtaccttccccttatcactaaggagaatagtatttgagaaatatgtatacatgatattatcatgaattagatatacagaatttgtaacactctcgaaatcacacgatgtgtcggcgttaagatctaatatatcactcgataacacattttcatctagatacactagacattttttaaagctaaaatagtctttagtagtaacagtaactatgcgattattttcatcgatgatacatttcatcggcatattattacgcttaccatcaaagactataccatgtgtatatctaacgtattctagcatggttgccatacgcgcattaaacttttcaggatctttggatagatcttccaatctatctatttgagaaaacatttttatcatgttcaatagttgaaacgtcggatccactatatagatattatctataaagattttaggaactacgttcatggtatcctggcgaatattaaaactatcaatgatatgattatcgttttcatcttttatcaccatatagtttctaagatatgggattttacttaatataatattatttcccgtgataaattttattagaaaggccaaatctataagaaaagtcctagaattagtctgaagaatatctatatcgccgtatagtatatttggattaattagatatagagaatatgatccgtaacatatacaacttttattatggcgtctaagatattcttccatcaacttattaacatttttgactagggaagatacattatgacgtcccattacttttgccttgtctattactgcgacgttcatagaatttagcatatctcttgccaattcttccattgatgttacattataagaaattttagatgaaattacatttggagctttaatagtaagaactcctaatatgtccgtgtatgtggtcactaatacagattgtagttctataatcgtaaataatttacctatattatatgtttgagtctgtttagaaaagtagctaagtatacgatcttttatttctgatgcagatgtattaacatcggaaaaaaatctttttttattcttttttactaaagatacaaatatgtctttgttaaaaacagttattttctgaatatttctagcttgtaattttaacatatgatattcgttcacactaggtactctgcctaaataggtttctataatctttaatgtaatattaggaaaagtattctgatcaggattcctattcattttgaggatttaaaactctgattattgtctaatatggtctctacgcaaactttttcacagagcgatagagtttttgataactcgtttttcttaagaaatataaaactactgtctccagagctcgctctatcttttattttatctaattcgatacaaactcctgatactggttcagaaagtaattcattaattttcagtcctttatagaagatatttaatatagataatacaaaatcttcagtttttgatatcgatctgattgatcctagaactagatatattaataacgtgctcattaggcagtttatggcagcttgataattagatatagtatattccagttcatatttattagataccgcattgcccagattttgatattctatgaattcctctgaaaataaatccaaaataactagacattctattttttgtggattagtgtactctcttccctctatcatgttcactactggtgtccacgatgataaatatctagagggaatataatatagtccataggatgccaatctagcaatgtcgaataactgtaattttattcttcgctcttcattatgaattgattcttgaggtataaacctaacacaaattatattattagacttttcgtatgtaatgtctttcatgttataagtttttaatcctggaatagaatctattttaatgaggcttttaaacgcagagttctccaacgagtcaaagcataatactctgttgtttttcttatatacgatgttacgattttcttctttgaatggaataggtttttgaattagtttataattacaacataatagataaggaagtgtgcaaatagtacgcggaaaaaacataatagctcccctgttttcatccatggttttaagtaaatgatcactggcttctttagtcaatggatattcgaacattaaccgtttcatcatcattggacagaatccatatttcttaatgtaaagagtgatcaaatcattgtgtttattgtaccatcttgttgtaaatgtgtattcggttatcggatctgctcctttttctattaaagtatcgatgtcaatctcgtctaagaattcaactatatcgacatatttcatttgtatacacataaccattactaacgtagaatgtataggaagagatgtaacgggaacagggtttgttgattcgcaaactattctaatacataattcttctgttaatacgtcttgcacgtaatctattatagatgccaagatatctatataattattttgtaagatgatgttaactatgtgatctatataagtagtgtaataattcatgtattttgatatatgttccaactctgtctttgtgatgtctagtttcgtaatatctatagcatcctcaaaaaatatattcgcatatattcccaagtcttcagttctatcttctaaaaaatcttcaacgtatggaatataataatctattttacctcttctgatatcattaatgatatagtttttgacactatcttctgtcaattgattcttattcactatatctaagaaacggatagcgtccctaggacgaactactgccattaatatctctattatagcttctggacataattcatctattataccagaattaatgggaactattccgtatctatctaacatagttttaagaaagtcagaatctaagacttgatgttcatatattggttcatacatgaaatgatctctattgatgatagtgactatttcattctctgaaaattggtaactcattctatatatgctttccttgttgatgaaggatagaatatactcaatagaatttgtaccaacaaactgttctcttatgaatcgtatatcatcatctgaaataatcatgtaaggcatacatttaacaattagagacttgtctcctgttatcaatatactattcttgtgataatttatgtgtgaggcaaatttgtccacgttctttaattttgttatagtagatatcaaatccaatggagctacagttcttggcttaaacagatatagtttttctggaacaaattctacaacattattataaaggactttgggtagataagtgggatgaaatcctattttaattaatgcgatagccttgtcctcgtgcagatatccaaacgcttttgtgatagtatggcattcattgtctagaaacgctctacgaatatctgtgacagatatcatctttagagaatatactagtcgcgttaatagtactacaatttgtattttttaatctatctcaataaaaaaattaatatgtatgattcaatgtataactaaactactaactgttattgataactagaatcagaatctaatgatgacgtaaccaagaagtttatctactgccaatttagctgcattatttttagcatctcgtttagattttccatcggccttatcgaatactcttccgtcgatgtctacacaggcataaaatgtaggagagttactaggcccaactgattcaatacgaaaagaccaatctctcctagtaatttggcagtactcattaataacggtgacagggttagcatctttccaatcaataatttttttagccggaataacatcatcaaaagacttatgatcctctctcattgatttttcgcgggatacatcatctattatgacgtcagccatagcatcagcatccggcttatccgcctccgttgtcataaaccaacgaggaggaatatcgtcggagctgtacaccatagcactacgttgaagatcgtacagagctttattaacttctcgcttctccatattaagttgtctagttagttgtgcagcagtagctccttcgattccaatgtttttaatagccgcacacacaatctctgcgtcagaacgctcgtcaatatagatcttagacatttttagagagaactaacgcaaccagcaataaaactgaacctactttatcatttttttattcatcatcctctggtggttcgtcgttcctatcaaatgtagctctgattaacccgtcatctataggtgatgctggttctggagattctggaggagatggattattatctggaagaatctctgttatttccttgttttcatgtatcgattgcgttgtaacattaagattgcgaaatgctctaaatttgggaggcttaaagtgttgtttgcaatctctacacgcgtgtctaactagtggaggttcgtcagctgctctagtttgaatcatcatcggcgtagtattcctacttttacagttaggacacggtgtattgtatttctcgtcgagaacgttaaaataatcgttgtaactcacatcctttattttatctatattgtattctactcctttcttaatgcattttataccgaataagagatagcgaaggaattctttttcggtgccgctagtacccttaatcatatcacatagtgttttatattccaaatttgtggcaatagacggtttatttctatacgatagtttgtttctggaatcctttgagtattctataccaatattattctttgattcgaatttagtttcttcgatattagattttgtattacctatattcttgatgtagtactttgatgatttttccatggcccattctattaagtcttccaagttggcatcatccacatattgtgatagtaattctcggatatcagtagcggctaccgccattgatgtttgttcattggatgagtaactactaatgtatacattttccatttataacacttatgtattaactttgttcatttatattttttcattattatgttgatattaacaaaagtgaatatatatatgttaataattgtattgtggttatacggctacaattttataatgagtgaaagtcagtgtccgatgatcaatgacgatagctttactctgaaaagaaagtatcaaatcgatagtgcggagtcaacaataaaaatggataagaagaggataaagtttcagaatagagccaaaatggtaaaagaaataaatcagacaataagagcagcacaaactcattacgagacattgaaactaggatacataaaatttaagagaatgattatgactactactctagaagatatagcaccatctattccaaataatcagaaaacttataaactattctcggacatttcagccatcggcaaagcatcacagaatccgagtaagatggtatatgctctgctgctttacatgtttcccaatttgtttggagatgatcatagattcattcgttatagaatgcatccaatgagtaaaatcaaacacaagatcttctctcctttcaaacttaatcttattagaatattagtggaagaaagattctataataatgaatgcagatctaataaatggagaataattggaacacaagttgataaaatgttgatagctgaatctgataaatatacaatagatgcaaggtataacctaaaacccatgtatagaatcaagggagaatctgaagaagataccctctttatcaaacagatggtagaacaatgtgtgacatcccaggaattggtggaaaaagtgttgaagatactgtttagagatttgttcaagagtggagaatacaaagcgtacagatacgatgatgatgtagaaaatggatttattggattggatacactaaaattaaacattgttcatgatatagttgaaccatgtatgcctgttcgtaggccagtggctaagatactgtgtaaagaaatggtaaataaatactttgagaatccgctacatattattggtaaaaatcttcaagagtgcattgactttgttagtgaataggcatttcatctttctccaatactaattcaaattgttaaattaataatggatagtataaatagttattagttataagatagtaaaaataattattagaataagagtgtagtatcatagataactctcttctataaaaatggattttattcgtagaaagtatcttatatacacagtagaaaataatatagattttttaaaggatgatacattaagtaaagtaaacaattttaccctcaatcatgtactagctctcaagtatctagttagcaattttcctcaacacgttattactaaggatgtattagctaataccaatttttttgttttcatacatatggtacgatgttgtaaagtgtacgaagcggttttacgacacgcatttgatgcacccacgttgtacgttaaagcattgactaagaattatttatcgtttagtaacgcaatacaatcgtacaaggaaaccgtgcataaactaacacaagatgaaaaatttttagaggttgccgaatacatggacgaattaggagaacttataggcgtaaattatgacttagttcttaatccattatttcacggaggggaacccatcaaagatatggaaatcatttttttaaaactgtttaagaaaacagacttcaaagttgttaaaaaattaagtgttataagattacttatttgggcatacctaagcaagaaagatacaggcatagagtttgcggataatgatagacaaaatatatacactctatttcaacaaactggtagaatcgtccatagcaatctaacagaaacgtttagagattatatctttcccggagataagactagctattgggtgtggttaaacgaaagtatagctaatgatgcggatatcgttcttaatagacacgccattaccatgtatgataaaattcttagttatatatactctgagataaaacaaggacgcgttaataaaaacatgcttaagttagtttatatctttgagcctgaaaaagatatcagagaacttctgctagaaatcatatatgatattcctggagatatcctatctattattgatgcaaaaaacgacgattggaaaaaatattttattagtttttataaagctaattttattaacggtaatacatttattagtgatagaacgtttaacgaggacttattcagagttgttgttcaaatagatcccgaatatttcgataatgaacgaattatgtctttattctctacgagtgctgcggacattaaacgatttgatgagttagatattaataacagttatatatctaatataatttatgaggtgaacgatatcacattagatacaatggatgatatgaagaagtgtcaaatctttaacgaggatacgtcgtattatgttaaggaatacaatacatacctgtttttgcacgagtcggatcccatggtcatagagaacggaatactaaagaaactgtcatctataaaatccaagagtagacggctgaacttgtttagcaaaaacattttaaaatattatttagacggacaattggctcgtctaggtcttgtgttagatgattataaaggagacttgttagttaaaatgataaaccatcttaagtctgtggaggatgtatccgcattcgttcgattttctacagataaaaaccctagtattcttccatcgctaatcaaaactattttagctagttataatatttccatcatcgtcttatttcaaaggtttttgagagataatctatatcatgtagaagaattcttggataaaagcatccatctaaccaagacggataagaaatatatacttcaattgataagacacggtagatcatagaacagaccaaatatattattaataatttgtatatacatagatataattatcacacatttttgataaatgggaactgctgcaacaattcagactcccaccaaattaatgaataaagaaaatgcagaaatgattttggaaaaaattgttgatcatatagttatgtatattagtgacgaatcaagtgattcagaaaataatcctgaatatattgattttcgtaacagatacgaagactatagatctctcattataaaaagtgatcacgagtttgtaaagctatgtaaaaatcatgcggagaaaagttctccagaaacgcaacaaatgattatcaaacacatatacgaacaatatcttattccagtatctgaagtactattaaaacctataatgtccatgggtgacataattacatataacggatgtaaagacaatgaatggatgctagaacaactctctaccctaaactttaacaatctccgcacatggaactcatgtagcataggcaatgtaacgcgtctgttttatacattttttagttatctgatgaaagataaactaaatatataagtataatcccattctaatactttaacctgatgtattagcatcttattagaatattaacctaactaaaagacataacataaaaactcattacatagttgataaaaagcggtaggatataaatattatggctgccaccgttccgcgttttgacgacgtgtacaaaaatgcacaaagaagaattctagatcaagaaacattttttagtagaggtctaagtagaccgttaatgaaaaacacatatctatttgataattacgcgtatggatggataccagaaactgcaatttggagtagtagatacgcaaacctagatgctagtgactattatcccatttcgttgggattacttaaaaagttcgagtttctcatgtctctatataaaggtcctattcccgtatatgaagaaaaagtaaatactgaattcatagccaatggatcgttctctggtagatacgtatcatatcttcgaaagttttctgcccttccaacaaacgagtttattagttttttgttactgacttccattccaatctataatatcttgttctggtttaaaaacacacagtttgatattactaaacacacattattcagatacgtctatacagataatgccaaacacctggcgttggctaggtatatgcatcaaacaggagactataagcctttgtttagtcgtctcaaagagaattatatatttaccggtcccgttccaataagtatcaaagatatagatcaccctaatcttagtagagcaagaagtccatccgattatgagacattagctaatattagtactatattgtactttaccaagtatgatccggtattaatgtttttattgttttacgtacctgggtattcaattactacaaaaattactccagccgtagaatatctaatggataaactgaatctaacaaagagcgacgtacaactgttgtaaattattttatgcttcgtaaaatgtaggttttgaaccaaacattctttcaaagaatgagatgcataaaactttattatccaatagattgactatttcggacgtcaatcgtttaaagtaaacttcgtaaaatattctttgatcactgccgagtttaaaacttctatcgataattgtctcatatgttttaatatttacaagttttttggtccatggtacattagccggacaaatatatgcaaaataatatcgttctccaagttctatagtttctggattatttttattatattcagtaactaaatacatattagggttatctgcggatttataatttgagtgatgcattctactcaacataaataattctagaggagacgatctactatcaaattcggatcgtaaatctgtttctaaagaacggagaatatctatacatacctgattagaattcatccgtccttcagacaacatctcagacagtctggttttgtacatcttaatcatattcttatgaaacttggaaacatctcttctagtttcactagtacctttattaattctctcaggtacagattttgaattcgacgatgctgagtatttcatcgttgtatatttcttcttcgattgcataatcagattcttatataccgcctcaaactctattttaaaattattaaacaatactctattattaatcagtcgttctaactctttcgctatttctatagacttatctacatcttgactgtctatctctgtaaacacggagtcggtatctccatacacgctacgaaaacgaaatctgtaatctataggcaacgatgttttcacaatcggattaatatctctatcgtccatataaaatggattacttaatggattggcaaaccgtaacataccgttagataactctgctccatttagtaccgattctagatacaagatcattctacgtcctatggatgtgcaactcttagccgaagcgtatgagtatagagcactatttctaaatcccatcagaccatatactgagttggctactatcttgtacgtatattgcatggaatcatagatggccttttcagttgaactggtagcctgttttagcatctttttatatctggctctctctgccaaaaatgttcttaatagtctaggaatggttccttctatcgatctatcgaaaattgctatttcagagatgaggttcggtagtctaggttcacaatgaaccgtaatatatctaggaggtggatatttctgaagcaatagctgattatttatttcttcttccaatctattggtactaacaacgacaccgactaatgtttccggagatagatttccaaagatacacacattaggatacagactgttataatcaaagattaatacattattactaaacattttttgttttggagcaaataccttaccgccttcataaggaaacttttgttttgtttctgatctaactaagatagttttagtttccaacaatagctttaacagtggacccttgatgactgtactcgctctatattcgaataccatggattgaggaagcacatatgttgacgcacccgcgtctgtttttgtttctactccataatactcccacaaatactgacacaaacaagcatcatgaatacagtatctagccatatctaaagctatgtttagattataatccttatacatctgagctaaatcaacgtcatcctttccgaaagataatttatatgtatcattaggtaaagtaggacataatagtacgactttaaatccattttcccaaatatctttacgaattactttacatataatatcctcatcaacagtcacataattacctgtggttaaaacctttgcaaatgcagcggctttgcctttcgcgtctgtagtatcgtcaccgatgaacgtcatttctctaactcctctatttaatactttacccatgcaactgaacgcgttcttggatatagaatccaatttgtacgaatccaatttttcaaatttttgaatgaatgaatatagatcgaaaaatatagttccattattgttattaacgtgaaacgtagtattggccatgccgcctactcccttatgactagactgatttctctcataaatacagagatgtacagcttcctttttgtccggagatctaaagataattttctctcctgttaataactctagacgattagtaatatatctcagatcaaagttatgtccgttaaaggtaacgacgtagtcgaacgttagttccaacaattgtttagctattcgtaacaaaactatttcagaacatagaactagttctcgttcgtaatccatttccattagtgactgtatcctcaaacatcctctatcgacggcttcttgtatttcctgttccgttaacatctcttcattaatgagcgtaaacaataatcgtttaccacttaaatcgatataacagtaacttgtatgcgagattgggttaataaatacagaaggaaacttcttatcgaagtgacactctatatctagaaataagtacgatcttgggatatcgaatctaggtatttttttagcgaaacagttacgtggatcgtcacaatgataacatccattgttaatctttgtcaaatattgctcgtccaacgagtaacatccgtctggagatatcccgttagaaatataaaaccaactaatattgagaaattcatccatggtggcattttgtatgctgcgtttctttggctcttctatcaaccacatatctgcgacggagcattttctatctttaatatctagattataacttattgtctcgtcaatgtctatagttctcatctttcccaacggcctcgcattaaatggaggaggagacaatgactgatatatttcgtccgtcactacgtaataaaagtaatgaggaaatcgtataaatacggtctcgccatttcgacatctggatttcagatataaaaatctgttttcaccgtgactttcaaaccaattaatgcaccgaacatccatttatagaatttagaaatatattttcatttaaatgaatcccaaacattggggaagagccgtatggaccattatttttatagtactttcgcaagcgggtttagacggcaacatagaagcgtgtaaacgaaaactatatactatagttagcactcttccatgtcctgcatgtagacggcacgcgactatcgctatagaggacaataatgtcatgtctagcgatgatctgaattatatttattattttttcatcagattatttaacaatttggcatctgatcccaaatacgcgatcgatgtgacaaaggttaaccctttataaacttaacccattataaaacttatgattagtcacaactgaaataaccgcgtgattattttttggtataattctacacggcatggtttctgtgactatgaattcaacccccgttacattagtgaaatctttaacaaacagcaagggttcgtcaaagacataaaactcattgtttacaatcgaaatagaccccctatcacacttaaaataaaaaatatccttatcctttaccaccaaataaaattctgattggtcaatgtgaatgtattcacttaacagttccacaaatttatttattaactccgaggcacatacatcgtcggtattttttatggcaaactttactcttccagcatccgtttctaaaaaaatattaacgagttccatttatatcatccaatattattgaaatgacgttgatggacagatgatacaaataagaaggtacggtacctttgtccaccatctcctccaattcatgctctattttgtcattaactttaatgtatgaaaacagtacgccacatgcttccatgacagtgtgtaacactttggatacaaaatgtttgacattagtataattgtccaagactgtcaatctataatagatagtagctataatatattctatgatggtattgaagaagatgacaaccttggcatattgatcatttaacacagacatggtatcaacagatagcttgaatgaaagagaatcagtaattggaataagcgtcttctcgatagagtgtccgtataccaacatgtctgatattttgatgtattccattaaattatttagttttttctttttattctcgttaaacagcatttctgtcaacggaccccaacatcgttgaccgattaagttttgattgatttttccgtgtaaggcgtatctagtcagatcgtatagcctatccaataatccatcgtctgtgtgtagatcacatcgtacactttttaattctctatagaagagcgacagacatctggagcaattacagacagcaatttctttattctctacagatgtaagatacttgaagacattcctatgatgatgcagaattttggataacacggtattgatggtatctgttaccataattcctttgatggctgatagtgtcagagcacaagatttccaatctttgacaatttttagcaccattatctttgttttgatatctatatcagacagcatggtgcgtctgacaacacagggattaagacggaaagatgaaatgattctctcaacatcttcaatagataccttgctattttttctggcattatctatatgtgcgagaatatcctctagagaatcagtatcctttttgatgatagtggatctcaatgacatgggacgtttaaaccttcttattctatcaccagattgcatggtgatttgtcttctttcttttatcataatgtaatctctaaattcatcggcaaattgtctatatctaaaatcataatatgagatgtttacctctacaaatatctgttcgtccaatgttagagtatttacatcagttttgtattccaaattaaacatggcaacggatttaattttatattcctctattaagtcctcgtcgataataacagaatgtagataatcatttaatccgtcgtacatggttggaagatgcttgttgacaaaatctttaattgtcttgatgaaggtgggactatatctaacatcttgattaataaaatttataacattgtccataggatactttgtaactagttttatacacatctcttcatcggtaagtttagacagaatatcgtgaacaggtggtatattatattcatcagatatacgaagaacaatgtccaaatctatattgtttaatatattatatagatgtagcgtagctcctacaggaatatctttaactaagtcaatgatttcatcaaccgttagatctattttaaagttaatcatataggcattgatttttaaaaggtatgtagccttgactacattctcattaattaaccattccaagtcattgtgtgtaagaagattatattctatcataagcttgactacatttggtcccgataccattaaagaattcttatgatataaggaaacagattttaggtactcatctactctacaagaattttggagagccttaacgatatcagtgacgtttattatttcaggaggaaagaatctaacattgagaatatcggaattaatagcttccagatacagtgattttggcaatagtccgtgtaatccataatccagtaacacgagctggtgcttgctagacaccttttcaatgtttaatttttttgaaataagctttgataaagccttcctcgcaaattccggatacatgaacatgtcggcgacatgattaagtattgttttttcattatttttatattttctcaacaagttctcaataccccaatagatgatagaatatcacccaatgcgtccatgttgtctatttccaacaggtcgctatatccaccaatagaagtttttccaaaaaagattctaggaacagttctaccaccagtaatttgttcaaaataatcccgcaattcattttcgggtttaaattctttaatatcgacaatttcatacgctcctcttttgaaactaaacttatttagaatatccagtgcatttctacaaaaaggacatgtatacttgacaaaaattgtcactttgttattggccaacctttgttgtacaaattcctcggccattttaatatttaagtgatataaaactatctcgacttatttaactctttagtcgagatatatggacgcagatagctatatgatagccaactacagaaggcaaacgctataaaaaacataattacgacgagcatatttataaatatttttattcagcattacttgatatagtaatattaggcacagtcaaacattcaaccactctcgatacattaactctctcattttctttaacaaattctgcaatatcttcgtaaaaagattcttgaaactttttagaatatctatcgactctagatgaaatagcgttcgtcaacatactatgttttgtatacataaaggcgcccattttaacagtttctagtgacaaaatgctagcgatcctaggatcctttagaatcacatagattgacgattcgtctctcttagtaactctagtaaaataatcatacaatctagtacgcgaaataatattatccttgacttgaggagatctaaacaatctagttttgagaacatcgataagttcatcgggaatgacatacatactatctttaatagaactcttttcatccagttgaatggattcgtccttaaccaactgattaatgagatcttctattttatcattttccagatgatatgtatgtccattaaagttaaattgtgtagcgcttctttttagtctagcagccaatactttaacatcactaatatcgatatacaaaggagatgatttatctatggcattaagaattcgtttttcgacatccgtcaaaaccaattcctttttgcctgtatcatccagttttccatcctttgtaaagaaattattttctactagactattaataagactgataaggattcctccataattgcacaatccaaactttttaacaaaactagactttacgagatctacaggaatgcgtacttcaggttttttagcttgtgattttttcttttgcggacattttctagtaaccaactcatctaccatttcattgattttagcagtgaaataagctttcaatgcacgggcactgatactattgaaaacgagttgatcttcaaattccgccatttaagttcaccaaacaacttttaaatacaaatatatcaatagtagtagaataagaactataaaaaaaataataattaaccaaccccaacaaccggtattattagttgatgtggtagttttctcatcacttagaacagatttaacaatttctataaagtctgtcaaatcatcttccggagaccccataaatacaccaaatatagcggcgtacaacttatccatttatacattgaatattggcttttctttatcgctatcttcatcatattcatcatcaatatcaacaagtcccagattacgagccagatcttcttctacattttcagtcattgatacacgttcactatctccagagagtccgataacgttagccaccacttctctatcaatgattagtttcttgagcgcgaaagtaatttttgtttccgttccggatctatagaagacgataggtgtgataattgccttggccaattgtctttctcttttactgagtgattctagttcaccttctatagatctgagaatggatgattctccagtcgaaacatattctaccatggatccgtttaatttgttgatgaagatggattcatccttaaatgttttctctgtaatagtttccaccgaaagactatgcaaagaatttggaatgcgttccttgtgcttaatgtttccatagacggcttctagaagttgatacaacataggactagccgcggtaacttttatttttagaaagtatccatcgcttctatcttgtttagatttatttttataaagtttagtctctccttccaacataataaaagtggaagtcatttgactagataaactatcagtaagttttatagagatagacgaacaattagcgtattgagaagcatttagtgtaacgtattcgatacattttgcattagatttactaatcgattttgcatactctataacacccgcacaagtctgtagagaatcgctagatgcagtaggtcttggtgaagtttcaactctcttcttgattaccttactcatgattaaacctaaataattgtactttgtaatataatgatatatattttcactttatctcatttgagaataaaaatgtttttgtttaaccactgcatgatgtacagatttcggaatcgcaaaccaccagtggttttattttatccttgtccaatgtgaattgaatgggagcggatgcgggtttcgtacgtagatagtacattcccgtttttagaccgagactccatccgtaaaaatgcatactcgttagtttggaataactcggatctgctatatggatattcatagattgactttgatcgatgaaggctcccctgtctgcagccatttttatgatcgtcttttgtggaatttcccaaatagttttataaactcgcttaatatcttctggaaggtttgtattctgaatggatccaccatctgccataatcctattcttgatctcatcattccataattttctctcggttaaaactctaaggagatgcggattaactacttgaaattctccagacaatactctccgagtgtaaatattactggtatacggttccaccgactcattatttcccaaaatttgagcagttgatgcagtcggcataggtgccaccaataaactatttctaagaccgtatgttctgattttatcttttagaggttcccaattccaaagatccgacggtacaacattccaaagatcatattgtagaataccgttactggcgtacgatcctacatatgtatcgtatggtccttccttctcagctagttcacaactcgcctctaatgcaccgtaataaatggtttcgaagatcttcttatttagatcttgtgcttccaggctatcaaatggataatttaagagaataaacgcgtccgctaatccttgaacaccaataccgataggtctatgtctcttattagagatttcagcttctggaataggataataattaatatctataattttattgagatttctgacaattactttgaccacatccttcagtttgagaaaatcaaatcgcccatctattacaaacatgttcaaggcaacagatgccagattacaaacggctacctcattagcatccgcatattgtattatctcagtgcaaagattactacacttgatagttcctaaattttgttgattactctttttgttacacgcatccttataaagaatgaatggagtaccagtttcaatctgagattctataatcgctttccagacgactcgagcctttattatagatttgtatctcctttctctttcgtatagtgtatacaatcgttcgaactcgtctccccaaacattgtccaatccaggacattcatccggacacatcaacgaccactctccgtcatccttcactcgtttcataaagagatcaggaatccaaagagctataaatagatctctggttctatgttcctcgtttcctgtattctttttaagatcgaggaacgccataatatcagaatgccacggttccaagtatatggccataactccaggccgtttgtttcctccctgatctatgtatctagcggtgttattataaactctcaacattggaataataccgtttgatataccattggtaccggagatatagcttccactggcacgaatattactaattgatagacctattccccctgccattttagagattaatgcgcatcgttttaacgtgtcatagataccctctatgctatcatcgatcatgttaagtagaaaacagctagacatttggtgacgactagttcccgcattaaataaggtaggagaagcgtgcgtaaaccatttttcagaaagtagattgtacgtctcaatagctgagtctatatcccattgatgaattcctactgcgacacgcattaacatgtgctgaggtctttcaacgatcttgttgtttattttcaacaagtaggatttttccaaagttttaaaaccaaaatagttgtatgaaaagtctcgttcgtaaataataaccgagttgagtttatccttatatttgttaactatatccatggtgatacttgaaataatcggagaatgtttcccatttttaggattaacatagttgaataaatcctccatcacttcactaaatagtttttttgtttccttgtgtagatttgatacggctattctggcggctagaatggcataatccggatgttgtgtagtacaagtggctgctatttcggctgccagagtgtccaattctaccgttgttactccattatatattccttgaataaccttcatagctattttaataggatctatatgatccgtgtttaagccataacataattttctaatacgagacgtgattttatcaaacatgacattttccttgtatccatttcgtttaatgacaaacatttttgttggtgtaataaaaaaattatttaacttttcattaatagggatttgacgtatgtagcgtacaaaatgattgttcctggtatatagataaagagtcctatatatttgaaaatcgttacggctcgattaaactttaatgattgcatagtgaatatatcattaggatttaactccttgactatcatggcggcgccagaaattaccatcaaaagcattaatacagttataccgatcgcagttagaacggttatagcatccaccatttatatctaaaaattagatcaaagaatatgtgacaaagtcctagttgtatactgagaattgacgaaacaatgtttcttacatatttttttcttattagtaaccgacttaatagtaggaactggaaaactagacttgattattctataagtatagatacccttccaaataatattctctttgataaaagttccagaaaatgtagaattttttaaaaagttatcttttgctattaccaagattgtgtttagacgcttattattaatatgagtgatgaaatccacaccgcctctagatatcgcctttatttccacattagatggtaaatccaatagtgaaactatctttttaggaatgtatggactcgcgtttagaggagtaaacgtcttaggcgtcggaaaggatgattcatcaaacgaataaacaatttcacaaatggatgttaatgtattagtaggaaattttttgacgctattggaattgaagattctaatggatgatgttctacctatttcatccgataacatgttaatttccgacaccaacggttttaatatttcgatgatatacggtagtctctctttcggacttatatagcttattccacaatacgagtcattatatactccaaaaaacaaaataactagtataaaatctgtatcgaatgggaaaaacgaaattatcgacataggtatagaatccggaacattgaacgtattaatacttaattctttttctgtggtaagtaccgataggttattgacattgtatggttttaaatattctataacttgagacttgatagatattagtgatgaattgaaaattatttttatcaccacgtgtgtttcaggatcatcgtcgacgcccgtcaaccaaccgaacggagtaaaataaatatcattaatatatgctctagatattagtatttttatcaatcctttgattatcatcttctcgtaggcgaatgattccatgatcaagagtgatttaagaacatcctccggagtattaatgggcttagtaaacagtccatcgttgcaataataaaagttatccaagttaaaggatattatgcattcgtttaaagatatcacctcatctgacggagacaattttttggtaggttttagagactttgaagctacttgtttaacaaagttattcatcgtcgtctactattctatttaattttgtagttaatttatcacatatcacattaattgactttttggtccacttttccatacgtttatattcttttaatcctgcgttatccgtttccgttatatccagggatagatcttgcaagttaaatagaatgctcttaaataatgtcattttcttatccgctaaaaatttaaagaatgtataaacctttttcagagatttgaaactcttaggtggtgtcctagtacacaatatcataaacaaactaataaacattccacattcagattccaacagctgattaacttccacattaatacagcctattttcgctccaaatgtacattcgaaaaatctgaataaaacatcgatgtcacaatttgtattatccaatacagaatgtttgtgattcgtgttaaaaccatcggagaaggaatagaaataaaaattattatagtggtggaattcagttggaatattgcctccggagtcataaaaggatactaaacattgttttttatcataaattacacatttccaatgagacaaataacaaaatccaaacattacaaatctagaggtagaacttttaattttgtctttaagtatatacgataagatatgtttattcataaacgcgtcaaatttttcatgaatcgctaaggagtttaagaatctcatgtcaaattgtcctatataatccacttcggatccataagcaaactgagagactaagttcttaatacttcgattgctcatccaggctcctctctcaggctctattttcatcttgacgacctttggattttcaccagtatgtattcctttacgtgataaatcatcgattttcaaatccatttgtgagaagtctatcgccttagatactttttcccgtagtcgaggtttaaaaaaatacgctaacggtatactagtaggtaactcaaagacatcatatatagaatggtaacgcgtctttaactcgtcggttaactctttcttttgatcgagttcgtcgctactattgggtctgctcaggtgccccgactctactagttccaacatcataccgataggaatacaagacactttgccggcggttgtagatttatcatatttttccactacatatccgttacaatttgttaaaaatttagatacatctatattgctacataatccagctagtgaatatatatgacataataaattggtaaatcctagttctggtattttactaattactaaatctgtatatctttccatttatcatggaaaagaatttaccagatatcttcttttttccaaactgcgttaatgtattctcttacaaatattcacaagatgaattcagtaatatgagtaaaacggaacgtgatagtttctcattggccgtgtttccagttataaaacatagatggcataacgcacacgttgtaaaacataaaggaatatacaaagttagtacagaagcacgtggaaaaaaagtatctcctccatcactaggaaaacccgcacacataaacctaaccgcgaagcaatatatatacagtgaacacacaataagctttgaatgttatagttttctaaaatgtataacaaatacagaaatcaattcgttcgatgagtatatattaagaggactattagaagctggtaatagtttacagatattttccaattccgtaggtaaacgaacagatactataggtgtactagggaataagtatccatttagcaaaattccattggcctcattaactcctaaagcacaacgagagatattttcagcgtggatttctcatagacctgtagttttaactggaggaactggagtgggtaagacgtcacaggtacccaagttattgctttggtttaattatttatttggtggattctctactctagataaaatcactgactttcacgaaagaccagtcattctatctcttcctaggatagctttagttagattgcatagcaataccattttaaaatcattgggatttaaggtactagatggatctcctatttctttacggtacggatctataccggaagaattaataaacaaacaaccaaaaaaatatggaattgtattttctacccataagttatctctaacaaaactatttagttatggcactcttattatagacgaagttcatgagcatgatcaaataggagatattattatagcagtagcgagaaagcatcatacgaaaatagattctatgtttttaatgactgccacgttagaggatgacagggaacggctaaaagtatttttacctaatcccgcatttatacatattcctggagatacactgtttaaaattagcgaggtatttattcataataagataaatccatcttccagaatggcatacatagaagaagaaaagagaaatttagttactgctatacagatgtatactcctcctgatggatcatccggtatagtctttgtggcatccgttgcacagtgtcacgaatataaatcatatttagaaaaaagattaccgtatgatatgtatattattcatggtaaggtcttagatatagacgaaatattagaaaaagtgtattcatcacctaatgtatcgataattatttctactccttatttggaatccagcgttactatacgcaatgttacacacatttatgatatgggtagagtttttgtccccgctccttttggaggatcgcaacaatttatttctaaatctatgagagatcaacgaaaaggaagagtaggaagagttaatcctggtacatacgtctatttctatgatctgtcttatatgaagtctatacagcgaatagattcagaatttctacataattatatattgtacgctaataagtttaatctaacactccccgaagatttgtttataatccctacaaatttggatattctatggcgtacaaaggaatatatagactcgttcgatattagtacagaaacatggaataaattattatccaattattatatgaagatgatagagtatgctaaactttatgtactaagtcctattctcgctgaggagttggataactttgagaggacgggagaattaactagtattgtacgagaagccattttatctctaaatttacaaattaagattttaaattttaaacataaagatgatgatacgtatatacacttttgtaaaatattattcggtgtctataacggaacaaacgctactatatattatcatagacctctaacgggatatatgaatatgatttcagatactatatttgttcctgtagataataactaaaaatcaaactctaatgaccacatctttttttagagatgaaaaattttccacatctccttttgtagacacgactaaacattttgcagaaaaaagtttattagtgtttagataatcgtatacttcatcagtgtagatagtaaatgtgaacagataaaaggtattcttgctcaatagattggtaaattccatagaatatattaatcctttcttcttgagatcccacatcatttcaaccagagacgttttatccaatgatttacctcgtactataccacatacaaaactagattttgcagtgacgtcgtacctggtattcctaccaaacaaaattttacttttagttcttttagaaaattctaaggtagaatctctatttgccaatatgtcatctatggaattaccactagcaaaaaatgatagaaatatatattgatacatcgcagctggttttgatctactatactttaaaaacgaatcagattccataattgcctgtatatcatcagctgaaaaactatgttttacacgtattccttcggcatttctttttaatgatatatcttgtttagacaatgataaagttatcatgtccatgagagacgcgtctccgtatcgtataaatatttcattagatgttagacgcttcattaggggtatacttctataaggtttcttaatcagtccatcattggttgcgtcaagaactactatcggatgttgttgggtatctctagtgttacacatggccttactaaagtttgggtaaataactatgatatctctattaattatagatgcatatatttcattcgtcaaggatattagtatcgacttgctatcgtcattaatacgtgtaatgtaatcatataaatcatgcgatagccaaggaaaatttaaatagatgttcatcatataatcgtcgctataattcatattaatacgttgacattgactaatttgtaatatagcctcgccacgaagaaagctctcgtattcagtttcatcgataaaggataccgttaaatataactggttgccgatagtctcatagtctattaagtggtaagtttcgtacaaatacagaatccctaaaatattatctaatgttggattaatctttaccataactgtataaaatggagacggagtcataactattttaccgtttgtacttactggaatagatgaaggaataatctccggacatgctggtaaagacccaaatgtctgtttgaagaaatccaatgttccaggtcctaatctcttaacaaaaattacgatattcgatcccgatatcctttgcattctatttaccagcatatcacgaactatattaagattatctatcatgtctattctcccaccgttatataaatcgcctccgctaagaaacgttagtatatccatacaatggaatacttcatttctaaaatagtattcgttttctaattctttaatgtgaaatcgtatactagaaagggaaaaattatctttgagttttccgttagaaaagaaccacgaaactaatgttctgattgcgtccgattccgttgctgaattaatggatttacaccaaaaactcatataacttctagatgtagaagcattcgctaaaaaattagtagaatcaaaggatataagtagatgttccaacaagtgagcaattcccaagatttcatctatatcattctcgaatccgaaattagaaattcccaagtagatatcctttttcatccgatcgttgatgaaaatacgaactttattcggtaagacaatcatttactaaggagtaaaataggaagtaatgttcgtatgtcgttatcatcgtataaattaaaggtgtgttttttaccattaagtgacattataattttaccaatattggaattataatataggtgtatttgcgcactcgcgacggttgatgcatcggtaaatatagctgtatctaatgttctagtcggtatttcatcatttcgctgtctaataatagcgttttctctatctgtttccattacagctgcctgaagtttattggtcggataatatgtaaaataataagaaatacatacgaataacaaaaataaaataagatataataaagatgccatttagagatctaattttgtttaacttgtccaaattcctacttacagaagatgaggaatcgttggagatagtgtcttccttatgtagaggatttgaaatatcttataatgacttgataacttactttccagataggaaataccataaatatatttataaagtatttgaacatgtagatttatcggaggaattaagtatggaattccatgatacaactctgagagatttagtctatcttagattgtacaagtattccaagtgtatacggccgtgttataaattaggagataatctaaaaggcatagttgttataaaggacaggaatatttatattagggaagcaaatgatgacttgatagaatatctcctcaaggaatacactcctcagatttatacatattctaatgagcgcgtccccataactggttcaaaattaattctttgtggattttctcaagttacatttatggcgtatacaacgtcgcatataacaacaaataaaaaggtagatgttctcgtttccaaaaaatgtatagatgaactagtcgatccaataaattatcaaatacttcaaaatttatttgataaaggaagcggaacaataaacaaaatactcaggaagatattttattcggtaacaggtggccaaactccataggtagctttttctatttcggattttagaatttccaaattcaccagcgatttatcggttttggtgaaatccaaggatttattaatgtccacaaatgccatttgttttgtctgtggattgtatttgaaaatggaaacgatgtagttagatagatgcgctgcgaagtttcctattagggttccgcgcttcacgtcacccagcatacttgaatcaccatcctttaaaaaaaatgataagatatcaacatggagtatatcatactcgaattttaattcttctactgactcactgacattttcacaaatactacaatacggtttaccgaaaataatcagtacgttcttcatttatgggtatcaaaaacttaaaatcgttactgctggaaaataaatcactgacgatattagatgataatttatacaaagtatacaatggaatatttgtggatacaatgagtatttatatagccgtcgccaattgtgtcagaaacttagaagagttaactacggtattcataaaatacgtaaacggatgggtaaaaaagggagggcatgtaaccctttttatcgatagaggaagtataaaaattaaacaagacgttagagacaagagacgtaaatattctaaattaaccaaggacagaaaaatgttagaattagaaaagtgtacatccgaaatacaaaatgttaccggatttatggaagaagaaataaaggcagaaatgcaattaaaaatcgataaactcacatttcaaatatatttatctgattctgataacataaaaatatcattgaatgagatactaacacatttcaacaataatgagaatgttacattattttattgtgatgaacgagacgcagaattcgttatgtgtctcgaggctaaaacacatttctctaccacaggagaatggccgttgataataagtaccgatcaggatactatgctatttgcatctgctgataatcatcctaagatgataaaaaacttaactcaactgtttaaatttgttccctcggcagaggataactatttagcaaaattaacggcgttagtgaatggatgtgatttctttcctggactctatggggcatctataacacccaccaacttaaacaaaatacaattgtttagtgattttacaatcgataatatagtcactagtttggcaattaaaaattattatagaaagactaactctaccgtagacgtgcgtaatattgttacgtttataaacgattacgctaatttagacgatgtctactcgtatattcctccttgtcaatgcactgttcaagaatttatattttccgcattagatgaaaaatggaatgaatttaaatcatcttatttagaaagcgtgccgttaccctgccaattaatgtacgcgttagaaccacgcaaggagattgatgtttcagaagttaaaactttatcatcttatatagatttcgaaaatactaaatcagatatcgatgttataaaatctatatcctcgatcttcggatattctaacgaaaactgtaacacgatagtattcggcatctataaggataatttactactgagtataaataattcattttactttaacgatagtctgttaataaccaatactaaaagtgataatataataaatataggttactagattaaaaatggtgttccaactcgtgtgctctacatgcggtaaagatatttctcacgaacgatataaattgattatacgaaaaaaatcattaaaggatgtactcgtcagtgtaaagaacgaatgttgtaggttaaaattatctacacaaatagaacctcaacgtaacttaacagtgcaacctctattggatataaactaatatggatccggttaattttatcaagacatatgcgcctagaggttctattatttttattaattataccatgtcattaacaagtcatttgaatccatcgatagaaaaacatgtgggtatttattatggtacgttattatcggaacacttggtagttgaatctacctatagaaaaggagttcgaatagtcccattggatagtttttttgaaggatatcttagtgcaaaagtatacatgttagagaatattcaagttatgaaaatagcagctgatacgtcattaactttattgggtattccgtatggatttggtcatgatagaatgtattgttttaaattggtagctgactgttataaaaatgccggtattgatacatcgtctaaacgaatattgggcaaagatatttttctgagccaaaacttcacagacgataatagatggataaagatatatgattctaataatttaacattttggcaaattgattaccttaaagggtgagttaatatgcataactactcctccgttgttttttccctcgttctttttcttaacgttgtttgccatcactctcataatgtaaagatattctaaaatggtaaacttttgcatatcggacgcagaaattggtataaatgttgtaattgtattatttcccgtcaatggactagtcacagctccatcagttttatatcctttagagtatttctcactcgtgtctaacattctagagcattccatgatctgtttatcgttgatattggccggaaagatagattttttattttttattatattactattggcaattgtagatataacttctggtaaatatttttctaccttttcaatctcttctattttcaagccggctatatattctgctatattgttgctagtatcaataccttttctggctaagaagtcatatgtggtattcactatatcagttttaactggtagttccattagcctttccacttctgcagaataatcagaaattggttctttaccagaaaatccagctactataataggctcaccgatgatcattggcaaaatcctatattgtaccagattaatgagagcatatttcatttccaataattctgctagttcttgagacattgatttatttgatgaatctagttggttctctagatactctaccatttctgccgcatacaataacttgttagataaaatcagggttatcaaagtgtttagcgtggctagaatagtgggcttgcatgtattaaagaatgcggtagtatgagtaaaccgttttaacgaattatatagtctccagaaatctgtggcgttacatacatgagccgaatgacatcgaagattgtccaatatttttaatagctgctctttgtccattatttctatatttgactcgcaacaattgtagataccattaatcaccgattcctttttcgatgccggacaatagcacaattgtttagctttggactctatgtattcagaattaatagatatatctctcaatacagattgcactatacattttgaaactatgtcaaaaattgtagaacgacgctgttctgcagccatttaactttaaataatttacaaaaatttaaaatgagcatccgtataaaaatcgataaactgcgccaaattgtggcatatttttcagagttcagtgaagaagtgtctataaatgtagactcgacggatgagttaatgtatatttttgccgccttgggcggatctgtaaacatttgggcaattatacctctaagtgcatcagtgttttaccgaggagccgaaaatattgtgtttaatcttcctgtgtccaaggtaaaatcgtgtttgtgtagttttcacaatgatgccatcatagatatagaacctgatctggaaaataatctagtaaaactttctagttatcatgtagtaagtgtcgattgtaacaaggaactgatgcctattaggacagatactactatttgtctaagtatagatcaaaagaaatcttacgtgtttaattttcacaagtatgaagaaaaatgttgtggtagaaccgtcattcatctagaatggttgttgggctttatcaagtgtattagtcagcatcagcatctggctattatgtttaaagatgacaatattattatgaagactcctggtaatactgatgcgttttccagggaatattctatgactgaatgttctcaagaactacaaaagttttctttcaaaatagctatctcgtctctcaacaaactacgaggattcaaaaagagagtcaatgtttttgaaactagaatcgtaatggataatgacgataacattttaggaatgttgttttcggatagagttcaatcctttaagatcaacatctttatggcgtttttagattaatactttcaatgagataaatatgggtggcggagtaagtgttgagctccctaaacgggatccgcctccgggagtacccactgatgagatgttattaaacgtggataaaatgcatgacgtgatagctcccgctaagcttttagaatatgtgcatataggaccactagcaaaagataaagaggataaagtaaagaaaagatatccagagtttagattagtcaacacaggacccggtggtctttcggcattgttaagacaatcgtataatggaaccgcacccaattgctgtcgcacttttaatcgtactcattattggaagaaggatggaaagatatcagataagtatgaagagggtgcagtattagaatcgtgttggccagacgttcacgacactggaaaatgcgatgttgatttattcgactggtgtcagggggatacgttcgatagaaacatatgccatcagtggatcggttcagcctttaataggagtaatagaactgtagagggtcaacaatcgttaataaatctgtataataagatgcaaacattatgtagtaaagatgctagtgtaccaatatgcgaatcatttttgcattatttacgcgcacacaatacagaagatagcaaagagatgatcgattatattctaagacaacagtctgcggactttaaacagaaatatatgagatgtagttatcccactagagataagttagaagagtcattaaaatatgcggaacctcgagaatgttgggatccagagtgttcgaatgccaatgttaatttcttactaacacgtaattataataatttaggactttgcaatattgtacgatgtaataccagcgtgaacaacttacagatggataaaacttcctcattaagattgtcatgtggattaagcaatagtgatagattttctactgttcccgtcaatagagcaaaagtagttcaacataatattaaacactcgttcgacctaaaattgcatttgatcagtttattatctctcttggtaatatggatactaattgtagctatttaaatgggtgccgcggcaagcatacagacgacggtgaatacactcagcgaacgtatctcgtctaaattagaacaagaagcgaacgctagtgctcaaacaaaatgtgatatagaaatcggaaatttttatatccgacaaaaccatggatgtaacctcactgttaaaaatatgtgctctgcggacgcggatgctcagttggatgctgtgttatcagccgctacagaaacatatagtggattaacaccggaacaaaaagcatacgtgccagctatgtttactgctgcgttaaacattcagacgagtgtaaacactgttgttagagattttgaaaattatgtgaaacagacttgtaattctagcgcggtcgtcgataacaaattaaagatacaaaacgtaatcatagatgaatgttacggagccccaggatctccaacaaatttggaatttattaatacaggatctagcaaaggaaattgtgccattaaagcgttgatgcaattgacgactaaggccactactcaaatagcacctagacaagttgctggtacaggagttcagttttatatgattgttatcggtgttataatattggcagcgttgtttatgtactatgccaagcgtatgttgttcacatccaccaatgataaaatcaaacttattttagccaataaggaaaacgtccattggactacttacatggacacattctttagaacttctccgatggttattgctaccacggatatgcaaaactgaaaatatattgataatattttaatagattaacatggaagttatcgctgatcgtctagacgatatagtgaaacaaaatatagcggatgaaaaatttgtagattttgttatacacggtctagagcatcaatgtcctgctatacttcgaccattaattaggttgtttattgatatactattatttgttatagtaatttatatttttacggtacgtctagtaagtagaaattatcaaatgttgttggtggtgctagtcatcacattaactattttttattactttatactataatagtactagactgacttctaacaaacatctcacctgccataaataaatgcttgatattaaagtcttctatttctaacactattccatctgtggaaaataatactctgacattatcgctaattgacacatcggtgagtgatatgcctataaagtaataatcttctttgggcacatataccagtgtaccaggttctaacaacctatttactggtgctcctgtagcatactttttctttaccttgagaatatccatcgtttgcttggtcaatagcgatatgtgattttttatcaaccactcaaaaaagtaattggagtgttcatatcctctacgggctattgtctcatggccgtgtatgaaatttaagtaacacgactgtggtagatttgttctatagagccgattgccgcaaatagatagaactaccaatatgtctgtacaaatgttaaacattaattgattaacagaaaaaacaatgttcgttctgggaatagaaaccagatcaaaacaaaattcgttagaatatatgccacgtttatacatggaatataaaataactacagtttgaaaaataacagtatcatttaaacatttaacttgcggggttaatctcacaactttactgtttttgaactgttcaaaatatagcatcgatccgtgagaaatacgtttagccgcctttaatagaggaaatcccaccgcctttctggatctcaccaacgacgatagttctgaccagcaactcatttcttcatcatccacctgttttaacatataataggcaggagatagatatccgtcattgcaatattccttctcgtaggcacacaatctaatattgataaaatctccattctcttctctgcatttattatcttgtctcggtggctgattaggctgtggtcttggtttaggccttggtctatcgttgttgaatctattttggtcattaaatctttcatttcttcctggtatatttctatcacctcgtttggttggatttttgtctatattatcgtttgtaacatcggtacgggtattcatttatcacaaaaaaaacttctctaaatgagtctactgctagaaaacctcatcgaagaagataccatattttttgcaggaagtatatctgagtatgatgatttacaaatggttattgccggcgcaaaatccaaatttccaagatctatgctttctatttttaatatagtacctagaacgatgtcaaaatatgagttggagttgattcataacgaaaatatcacaggagcaatgtttaccacaatgtataatataagaaacaatttgggtctaggagatgataaactaactattgaagccattgaaaactatttcttggatcctaacaatgaagttatgcctcttattattaataatacggatatgactgccgtcattcctaaaaaaagtggtaggagaaagaataagaacatggttatcttccgtcaaggatcatcacctatcttgtgcattttcgaaactcgtaaaaagattaatatttataaagaaaatatggaatccgcgtcgactgagtatacacctatcggagacaacaaggctttgatatctaaatatgcgggaattaatgtcctgaatgtgtattctccttccacatccataagattgaatgccatttacggattcaccaataaaaataaactagagaaacttagtactaataaggaactagaatcgtatagttctagccctcttcaagaacccattaggttaaatgattttctgggactattggaatgtgttaaaaagaatattcctctaacagatattccgacaaaggattgattactataaatggagaatgttcctaatgtatactttaatcctgtgtttatagagcccacgtttaaacattctttattaagtgtttataaacacagattaatagttttatttgaagtattcgttgtattcattctaatatatgtattttttagatctgaattaaatatgttcttcatgcctaaacgaaaaatacccgatcctattgatagattacgacgtgctaatctagcgtgtgaagacgataaattaatgatctatggattaccatggatgacaactcaaacatctgcgttatcaataaatagtaaaccgatagtgtataaagattgtgcaaagcttttgcgatcaataaatggatcacaaccagtatctcttaacgatgttcttcgcagatgatgattcattttttaagtatttggctagtcaagatgatgaatcttcattatctgatatattgcaaatcactcaatatctagactttctgttattattattgatccaatcaaaaaataaattagaagctgtgggtcattgttatgaatctctttcagaggaatacagacaattgacaaaattcacagactttcaagattttaaaaaactgtttaacaaggtccctattgttacagatggaagggtcaaacttaataaaggatatttgttcgactttgtgattagtttgatgcgattcaaaaaagaatcctctctagctaccaccgcaatagatcctgttagatacatagatcctcgtcgcaatatcgcattttctaacgtgatggatatattaaagtcgaataaagtgaacaataattaattctttattgtcatcatgaacggcggacatattcagttgataatcggccccatgttttcaggtaaaagtacagaattaattagacgagttagacgttatcaaatagctcaatataaatgcgtgactataaaatattctaacgataatagatacggaacgggactatggacgcatgataagaataattttgaagcattggaagcaactaaactatgtgatgtcttggaatcaattacagatttctccgtgataggtatcgatgaaggacagttctttccagacattgtttaattctgtgagcgtatggcaaacggtaccgagctcttttttttttttttttttttggcatataaataagtcgactccctatcagtgatagagaatggtgaagcgtgagaaaaatgtcatctatggccctgagcctctccatcctttggaggatttgactgccggcgaaatgctgtttcgtgctctccgcaagcactctcatttgcctcaagccttggtcgatgtggtcggcgatgaatctttgagctacaaggagttttttgaggcaaccgtcttgctggctcagtccctccacaattgtggctacaagatgaacgacgtcgttagtatctgtgctgaaaacaatacccgtttcttcattccagtcatcgccgcatggtatatcggtatgatcgtggctccagtcaacgagagctacattcccgacgaactgtgtaaagtcatgggtatctctaagccacagattgtcttcaccactaagaatattctgaacaaagtcctggaagtccaaagccgcaccaactttattaagcgtatcatcatcttggacactgtggagaatattcacggttgcgaatctttgcctaatttcatctctcgctattcagacggcaacatcgcaaactttaaaccactccacttcgaccctgtggaacaagttgcagccattctgtgtagcagcggtactactggactcccaaagggagtcatgcagacccatcaaaacatttgcgtgcgtctgatccatgctctcgatccacgcgtgggcactcagctgattcctggtgtcaccgtcttggtctacttgcctttcttccatgctttcggctttagcattactttgggttactttatggtcggtctccgcgtgattatgttccgccgttttgatcaggaggctttcttgaaagccatccaagattatgaagtccgcagtgtcatcaacgtgcctagcgtgatcctgtttttgtctaagagcccactcgtggacaagtacgacttgtcttcactgcgtgaattgtgttgcggtgccgctccactggctaaggaggtcgctgaagtggccgccaaacgcttgaatcttccagggattcgttgtggcttcggcctcaccgaatctaccagcgctaacattcactctctcggggatgagtttaagagcggctctttgggccgtgtcactccactcatggctgctaagatcgctgatcgcgaaactggtaaggctttgggcccgaaccaagtgggcgagctgtgtatcaaaggccctatggtgagcaagggttatgtcaataacgttgaagctaccaaggaggccatcgacgacgacggctggttgcattctggtgattttggatattacgacgaagatgagcatttttacgtcgtggatcgttacaaggagctgatcaaatacaagggtagccaggttgctccagctgagttggaggagattctgttgaaaaatccatgcattcgcgatgtcgctgtggtcggcattcctgatctggaggccggcgaactgccttctgctttcgttgtcaagcagcctggtaaagaaattaccgccaaagaagtgtatgattacctggctgaacgtgtgagccatactaagtacttgcgtggcggcgtgcgttttgttgactccatccctcgtaacgtaacaggcaaaattacccgcaaggagctgttgaaacaattgttggagaaggccggcggtggttccggagccacgaacttctctctgttaaagcaagcaggagacgtggaagaaaaccccggtcccatggcctcctccgaggacgtcatcaaggagttcatgcgcttcaaggtgcgcatggagggctccgtgaacggccacgagttcgagatcgagggagagggcgagggccgcccctacgagggcacccagaccgccaagctgaaggtgaccaagggcggccccctgcccttcgcctgggacatcctgtcccctcagttccagtacggctccaaggcctacgtgaagcaccccgccgacatccccgactacttgaagctgtccttccccgagggcttcaagtgggagcgcgtgatgaacttcgaggacggcggcgtggtgaccgtgacccaggactcctccctgcaggacggcgagttcatctacaaggtgaagctgcgcggcaccaacttcccctccgacggccccgtaatgcagaagaagaccatgggctgggaggcctccaccgagcggatgtaccccgaggacggcgccctgaagggcgagatcaagatgaggctgaagctgaaggacggcggccactacgacgccgaggtcaagaccacctacatggccaagaagcccgtgcagctgcccggcgcctacaagaccgacatcaagctggacatcacctcccacaacgaggactacaccatcgtggaacagtacgagcgcgccgagggccgccactccaccggcgcctaattaattaatttttatcgatctaattcaacaatgtctggagagctcggatccttctgtgagcgtatggcaaacgaaggaaaaatagttatagtagccgcactcgatgggacatttcaacgtaaaccgtttaataatattttgaatcttattccattatctgaaatggtggtaaaactaactgctgtgtgtatgaaatgctttaaggaggcttccttttctaaacgattgggtgaggaaaccgagatagaaataataggaggtaatgatatgtatcaatcggtgtgtagaaagtgttacatcgactcataatattatattttttatctaaaaaactaaaaataaacattgattaaattttaatataatacttaaaaatggatgttgtgtcgttagataaaccgtttatgtattttgaggaaattgataatgagttagattacgaaccagaaagtgcaaatgaggtcgcaaaaaaactgccgtatcaaggacagttaaaactattactaggagaattattttttcttagtaagttacagcgacacggtatattagatggtgccaccgtagtgtatataggatctgctcccggtacacatatacgttatttgagagatcatttctataatttaggagtgatcatcaaatggatgctaattgacggccgccatcatgatcctattttaaatggattgcgtgatgtgactctagtgactcggttcgttgatgaggaatatctacgatccatcaaaaaacaactgcatccttctaagattattttaatttctgatgtgagatccaaacgaggaggaaatgaacctagtacggcggatttactaagtaattacgctctacaaaatgtcatgattagtattttaaaccccgtggcgtctagtcttaaatggagatgcccgtttccagatcaatggatcaaggacttttatatcccacacggtaataaaatgttacaaccttttgctccttcatattcagctgaaatgagattattaagtatttataccggtgagaacatgagactgactcgagttaccaaattagacgctgtaaattatgaaaaaaagatgtactaccttaataagatcgtccgtaacaaagtagttgttaactttgattatcctaatcaggaatatgactattttcacatgtactttatgctgaggaccgtgtactgcaataaaacatttcctactactaaagcaaaggtactatttctacaacaatctatatttcgtttcttaaatattccaacaacatcaactgaaaaagttagtcatgaaccaatacaacgtaaaatatctagcaaaaattctatgtctaaaaacagaaatagcaagagatccgtacgcggtaataaatagaaacgtactactgagatatactaccgatatagagtataatgatttagttactttaataaccgttagacataaaattgattctatgaaaactgtgtttcaggtatttaacgaatcatccataaattatactccggttgatgatgattatggagaaccaatcattataacatcgtatcttcaaaaaggtcataacaagtttcctgtaaattttctatacatagatgtggtaatatctgacttatttcctagctttgttagactagatactacagaaactaatatagttaatagtgtactacaaacaggcgatggtaaaaagactcttcgtcttcccaaaatgttagagacggaaatagttgtcaagattctctatcgccctaatataccattaaaaattgttagatttttccgcaataacatggtaactggagtagagatagccgatagatctgttatttcagtcgctgattaatcaattagtagagatgagataagaacattataataatcaataatatatcttatatcttatatcttatatcttatatcttgtttagaaaaatgctaatattaaaatagctaacgctagtaatccaatcggaagccatttgatatctataatagggtatctaatttcctgatttaaatagcggacagctatattctcggtagctactcgtttggaatcacaaacattatttacatctaatttactatctgtaatggaaacgtttcccaatgaaatggtacaatccgatacattgcattttgttatatttttttttaaagaggctggtaacaacgcatcgcttcgtttacatggctcgtaccaacaataatagggtaatcttgtatctattcctatccgtactatgcttttatcaggataaatacatttacatcgtatatcgtctttgttagcatcacagaatgcataaatttgttcgtccgtcatgataaaaatttaaagtgtaaatataactattatttttatagttgtaataaaaagggaaatttgattgtatactttcggttctttaaaagaaactgacttgataaaaatggctgtaatctctaaggttacgtatagtctatatgatcaaaaagagattaatgctacagatattatcattagtcatgttaaaaatgacgacgatatcggtaccgttaaagatggtagactaggtgctatggatggggcattatgtaagacttgtgggaaaacggaattggaatgtttcggtcactggggtaaagtaagtatttataaaactcatatagttaagcctgaatttatttcagaaattattcgtttactgaatcatatatgtattcactgcggattattgcgttcacgagaaccgtattccgacgatattaacctaaaagagttatcgggacacgctcttaggagattaaaggataaaatattatccaagaaaaagtcatgttggaacagtgaatgtatgcaaccgtatcaaaaaattactttttcaaagaaaaaggtttgtttcgtcaacaagttggatgatattaacgttcctaattctctcatctatcaaaagttaatttctattcatgaaaagttttggccattattagaaattcatcaatatccagctaacttattttatacagactactttcccatccctccgttgattattagaccggctattagtttttggatagatagtatacccaaagagaccaatgaattaacttacttattaggtatgatcgttaagaattgtaacttgaatgctgatgaacaggttatccagaaggcggtaatagaatacgatgatattaaaattatttctaataacactaccagtatcaatttatcatatattacatccggcaaaaataatatgattagaagttatatcgtcgcccgacgaaaagatcagaccgctagatctgtaattggtcccagtacatctatcaccgttaatgaggtaggaatgcccgcatatattagaaatacacttacagaaaagatatttgttaatgcctttacagtggataaagttaaacaactattagcgtcaaaccaagttaaattttactttaataaacgattaaaccaattaacaagaatacgccaaggaaagtttattaaaaataaaatacatttattgcctggtgattgggtagaagtagctgttcaagaatatacaagtattatttttggaagacagccgtctctacatagatacaacgtcatcgcttcatctatcagagctaccgaaggagatactatcaaaatatctcccggaattgccaactctcaaaatgctgatttcgacggggatgaggaatggatgatattagaacaaaatcctaaagctgtaattgaacaaagtattcttatgtatccgacgacgttactcaaacacgatattcatggagcccccgtttatggatctattcaagatgaaatcgtagcagcgtattcattgtttaggatacaagatctttgtttagatgaagtattgaacatcttggggaaatatggaagagagttcgatcctaaaggtaaatgtaaattcagcggtaaagatatctatacttacttgataggtgaaaagattaattatccgggtctcttaaaggatggtgaaattattgcaaacgacgtagatagtaattttgttgtggctatgaggcatctgtcattggctggactcttatccgatcataagtcgaacgtggaaggtatcaactttattatcaagtcatcttatgtttttaagagatatctatctatttacggttttggggtgacattcaaagatctgagaccaaattcgacgttcactaataaattggaggccatcaacgtagaaaaaatagaacttatcaaagaagcatacgccaaatatctcaacgatgtaagagacgggaaaatagttccattatctaaagctttagaggcggactatgtggaatccatgttatccaacttgacaaatcttaatatccgagagatagaagaacatatgagacaaacgctgatagatgatccagataataacctcctgaaaatggccaaagcgggttataaagtaaatcccacagaactaatgtatattctaggtacgtatggacaacaaaggattgatggtgaaccagcagagactcgagtattgggtagagttttaccttactatcttccagactctaaggatccagaaggaagaggttacattcttaattctttaacaaaaggattaacgggttctcaatattacttttcgatgctggttgccagatctcaatctactgatatcgtctgtgaaacatcacgtaccggaacactggctagaaaaatcattaaaaagatggaggatatggtggtcgacggatacggacaagtagttataggtaatacgctcatcaagtacgccgccaattataccaaaattctaggctcagtatgtaaacctgtagatcttatctatccagatgagtccatgacttggtatttggaaattagtgctctgtggaataaaataaaacagggattcgtttactctcagaaacagaaacttgcaaagaagacattggcgccgtttaatttcctagtattcgtcaaacccaccactgaggataatgctattaaggttaaggatctgtacgatatgattcataacgtcattgatgatgtgagagagaaatacttctttacggtatctaatatagattttatggagtatatattcttgacgcatcttaatccttctagaattagaattacaaaagaaacggctatcactatctttgaaaagttctatgaaaaactcaattatactctaggtggtggaactcctattggaattatttctgcacaggtattgtctgagaagtttacacaacaagccctgtccagttttcacactactgaaaaaagtggtgccgtcaaacaaaaacttggtttcaacgagtttaataacttgactaatttgagtaagaataagaccgaaattatcactctggtatccgatgatatctctaaacttcaatctgttaagattaatttcgaatttgtatgtttgggagaattaaatccaaacatcactcttcgaaaagaaacagataaatatgtagtagatataatagtcaatagattatacatcaagagagcagaaataaccgaattagtcgtcgaatatatgattgaacgatttatctcctttagcgtcattgtaaaggaatggggtatggagacattcattgaggacgaggataatattagatttactgtctacctaaatttcgttgaaccggaagaattgaatcttagtaagtttatgatggttcttccgggggcagccaacaagggaaagattagtaaattcaagattcctatctctgattatacgggatatgacgacttcaatcaaacaaaaaagctcaataagatgactgtagaactcatgaatctaaaagaattgggttctttcgatttggaaaacgtcaacgtgtatcctggagtatggaatacatacgatatcttcggtatcgaggccgctcgtgaatacttgtgcgaagccatgttaaacacctatggagaagggttcgattatctgtatcagccttgtgatcttctcgctagtttactatgtgctagttacgaaccagaatcagtgaataaattcaagttcggcgcagctagtactcttaagagagctacgttcggagacaataaagcattgttaaacgcggctcttcataaaaagtcagaacctattaacgataatagtagctgccacttttttagcaaggtccctaatataggaactggatattacaaatactttatcgacttgggtcttctcatgagaatggaaaggaaactatctgataagatatcttctcaaaagatcaaggaaatggaagaaacagaagacttttaattcttatcaataacatatttttctatgatctgtcttttaaacgatggattttccacaaatgcgcctctcaagtccctcatagaatgatacacgtataaaaaatatagcataggcaatgactccttatttttagacattagatatgccaaaatcatagccccgcttctatttactcccgcagcacaatgaaccaacacgggctcgtttcgttgatcacatttagataaaaaggcggttacgtcgtcaaaatatttactaatatcggtagttgtatcatctaccaacggtatatgaataatattaatattagagttaggtaatgtatatttatccatcgtcaaatttaaaacatatttgaacttaacttcagatgatggtgcatccatagcatttttataatttcccaaatacacattattggttacccttgtcattatagtgggagatttggctttgtgcatatctccagttgaacgtagtagtaagtatttatacaaacttttcttatccatttataacgtacaaatggataaaactactttatcggtaaacgcgtgtaatttagaatacgttagagaaaaggctatagtaggcgtacaagcagccaaaacatcaacacttatattctttgttattatattggcaattagtgcgctattactctggtttcagacgtctgataatccagtctttaatgaattaacgagatatatgcgaattaaaaatacggttaacgattggaaatcattaacggatagcaaaacaaaattagaaagtgatagaggtagacttctagccgctggtaaggatgatatatttgaattcaaatgtgtggatttcggcgcctattttatagctatgcgattggataagaaaacatatctgccgcaagctattaggcgaggtactggagacgcgtggatggttaaaaaggcggcaaaggtcgatccatctgctcaacaattttgtcagtatttgataaaacacaagtctaataatgttattacttgtggtaatgagatgttaaatgaattaggttatagcggttattttatgtcaccgcattggtgttccgattttagtaatatggaatagtgttagataaatgcggtaacgaatgttcctgtaaggaaccataacagcttagatttaacgttaaagatgagcataaacataataaacaaaattacaatcaaacttataacattaatatcaaacaatccaaaaaatgaaatcagtggagtagtaaacgcgtacataactcctggataacgtttagcagctgccgttcctattctagaccaaaaattcggtttcatgttttcgaaacggtattctgcaacaagtcgaggatcgtgttctacatatttggcggcattatccagtatctgcctattgatcttcatttcgttttcgattctggctatttcaaaataaaatcccgatgatagacctccagactttataatttcatctacgatgttcagcgccgtagtaactctaataatataggctgataagctaacatcataccctcctgtatatgtgaatatggcatgatttttgtccattacaagctcggttttaactttattgcctgtaataatttctctcatctgtaggatatctatttttttgtcatgcattgccttcaagacgggacgaagaaacgtaatatcctcaataacgttatcgttttctacaataactacatattctacctttttattttctaactcggtaaaaaaattagaatcccatagggctaaatgtctagcgatatttcttttcgtttcctctgtacacatagtgttacaaaaccctgaaaagaagtgagtatacttgtcatcatttctaatgtttcctccagtccactgtataaacgcataatccttgtaatgatctggatcatccttgactaccacaacatttcttttttctggcataacttcgttgtcctttacatcatcgaacttctgatcattaatatgctcatgaacattaggaaatgtttctgatggaggtctatcaataactggcacaacaataacaggagttttcaccgccgccatttagttattgaaattaatcatatacaactctttaatacgagttatattttcgtctatccattgtttcacattgacatatttcgacaaaaagatataaaatgcgtattccaatgcttctctgtttaatgaattactaaaatatacaaacacgtcactgtctggcaataaatgatatcttagaatattgtaacaatttattttgtattgcacatgttcgtgatctatgagttcttcttcgaatggcataggatctccgaatctgaaaacgtataaataggagttagaataataatatttgagagtattggtaatatataaactctttagcggtataattagtttttttctctcaatttctatttttagatgtgatggaaaaatgactaattttgtagcattagtatcatgaactctaatcaaaatcttaatatcttcgtcacacgttagctctttgaagtttttaagagatgcatcagttggttctacagatggagtaggtgcaacaattttttgttctacacatgtatgtactggagccattgttttaactataatggtgcttgtatcgaaaaactttaatgcagatagcggaagctcttcgccgcgactttctacgtcgtaattgggttctaacgccgatctctgaatggatactagttttctaagttctaatgtgattctctgaaaatgtaaatccaattcctccggcattatagatgtgtatacatcggtaaataaaactatagtatccaacgatcccttctcgcaaattctagtcttaaccaaaaaatcgtatataaccacggagatggcgtatttaagagtggattcttctaccgttttgttcttggatgtcatataggaaactataaagtccgcactactgttaagaatgattactaacgcaactatatagtttaaattaagcattttggaaacataaaataactctgtagacgatacttgactttcgaataagtttgcagacaaacgaagaaagaacagacctctcttaatttcagaagaaaactttttttcgtattcctgacgtctagagtttatatcaataagaaagttaagaattagtcggttaatgttgtatttcattacccaagtttgagatttcataatattatcaaaagacatgataatattaaagataaagcgctgactatgaacgaaatagctatatggttcgctcaagaatatagtcttgttaaacgtggaaacgataactgtatttttaatcacgtcagcggcatctaaattaaatataggtatatttattccacacactctacaatatgccacaccatcttcataataaataaattcgttagcaaaattattaattttagtgaaatagttagcgtcaactttcatagcttccttcaatctaatttgatgctcacacggtgcgaattccactctaacatcccttttccatgcctcaggttcatcgatctctataatatctagttttttgcgtttcacaaacacaggctcgtctctcgcgatgagatctgtatagtaactatgtaaatgataactagatagaaagatgtagctatatagatgacgatcctttaagagaggtataataactttaccccaatcagatagactgttgttatggtcttcggaaaaagaatttttataaatttttccagtattttccaaatatacgtacttaacatctaaaaaatccttaatgataataggaatggataatccgtctattttataaagaaatacatatcgcacattatacttttttttggaaatgggaataccgatgtgtctacataaatatgcaaagtctaaatattttttagagaatcttagttggtccaaattcttttccaagtacggtaatagatttttcatattgaacggtatcttcttaatctctggttctagttccgcattaaatgatgaaactaagtcactatttttataactaacgattacatcacctctaacatcatcatttaccagaatactgatcttcttttgtcgtaaatacatgtctaatgtgttaaaaaaaagatcatacaagttatacgtcatttcatctgtggtattcttgtcattgaaggataaactcgtactaatctcttctttaacagcctgttcaaatttatatcctatatacgaaaaaatagcaaccagtgtttgatcatccgcgtcaatattctgttctatcgtagtgtataacaatcgtatatcttcttctgtgatagtcgatacgttataaaggttgataacgaaaatatttttatttcgtgaaataaagtcatcgtaggattttggacttatattcgcgtctagtagatatgcttttatttttggaatgatctcaattagaatagtctctttagagtccatttaaagttacaaacaactaggaaattggtttatgatgtataatttttttagtttttatagattctttattctatacttaaaaaatgaaaataaatacaaaggttcttgagggttgtgttaaattgaaagcgagaaataatcataaattatttcattatcgcgatatccgttaagtttgtatcgtaatggcgtggtcaattacgaataaagcggatactagtagcttcacaaagatggctgaaatcagagctcatctaaaaaatagcgctgaaaataaagataaaaacgaggatattttcccggaagatgtaataattccatctactaagcccaaaaccaaacgagccactactcctcgtaaaccagcggctactaaaagatcaaccaaaaaggaggaagtggaagaagaagtagttatagaggaatatcatcaaacaactgaaaaaaattctccatctcctggagtcagcgacattgtagaaagcgtggccgctgtagagctcgatgatagcgacggggatgatgaacctatggtacaagttgaagctggtaaagtaaatcatagtgctagaagcgatctctctgacctaaaggtggctaccgacaatatcgttaaagatcttaagaaaattattactagaatctctgcagtatcgacggttctagaggatgttcaagcagctggtatctctagacaatttacttctatgactaaagctattacaacactatctgatctagtcaccgagggaaaatctaaagttgttcgtaaaaaagttaaaacttgtaagaagtaaatgcgtgcacttttttataaagatggtaaactctttaccgataataattttttaaatcctgtatcagacgataatccagcgtatgaggttttgcaacatgttaaaattcctactcatttaacagatgtagtagtatatgaacaaacgtgggaggaggcgttaactagattaatttttgtgggaagtgattcaaaaggacgtagacaatacttttacggaaaaatgcatgtacagaatcgcaacgctaaaagagatcgtatttttgttagagtatataacgttatgaaacgaattaattgttttataaacaaaaatataaagaaatcgtccacagattccaattatcagttggcggtttttatgttaatggaaactatgttttttattagatttggtaaaatgaaatatcttaaggagaatgaaacagtagggttattaacactaaaaaataaacacatagaaataagtcccgatgaaatagttatcaagtttgtaggaaaggacaaagtttcacatgaatttgttgttcataagtctaatagactatataaaccgctattgaaactgacggatgattctagtcccgaagaatttctgttcaacaaactaagtgaacgaaaggtatacgaatgtatcaaacagtttggtattagaatcaaggatctccgaacgtatggagtcaattatacgtttttatataatttttggacaaatgtaaagtccatatctcctcttccgtcaccaaaaaagttaatagcattaactatcaaacaaactgctgaagtggtaggtcatactccatcaatttcaaaaagagcttatatggcaacgactattttagaaatggtaaaggataaaaattttttagatgtagtatctaaaactacgttcgatgaattcctatctatagtcgtagatcacgttaaatcatctacggatggatgatatagatctttacacaaataattacaagaccgataaatggaaatggataagcgtatgaaatctctcgcaatgacagctttcttcggagagctaagcacattagatattatggcattgataatgtctatatttaaacgccatccaaacaataccattttttcagtggataaggatggtcagtttatgattgatttcgaatacgataattataaggcttctcaatatttggatctgaccctcactccgatatctggagatgaatgcaagactcacgcatcgagtatagccgaacaattggcgtgtgcggatattattaaagaggatattagcgaatatatcaaaactactccccgtcttaaacgatttataaaaaaataccgcaatagatcagatactcgtatcagtcgagatacagaaaagcttaaaatagctctagctaaaggcatagattacgaatatataaaagacgcttgttaataagtaaatgaaaaaaaactagtcgtttataataaaacacgatatggatgccaacgtagtatcattttctactattgcgacgtatatagacgctttagcgaagaatgcttcggaattagaacagaggtctaccgcatacgaaataaataatgaattggaactagtatttattaagccgccattgattactttgacaaatgtagtgaatatctctacgattcaggaatcgtttattcgatttaccgttactaataaggaaggtgttaaaattagaactaagattccattatctaaggtacatggtctagatgtaaaaaatgtacagttagtagatgctatagataacatagtttgggaaaagaaatcattagtgacggaaaatcgtcttcacaaagaatgcttgttgagactatcgacagaggaacgtcatatatttttggattacaagaaatatggatcctctatccgactagaattagtcaatcttattcaagcaaaaacaaaaaactttacgatagactttaagctaaaatattttctaggatccggtgcccagtctaaaagttctttgttgcacgctattaatcatccaaagtcaaggcctaatacatctctggaaatagaattcacacctagagacaatgaaacagttccatatgatgaactaataaaggaattgacgactctctcgcgtcatatatttatggcttctccagagaatgtaattctttctccgcctattaacgcgcctataaaaacctttatgttgcctaaacaagatatagtaggtttggatctggaaaatctatatgccgtaactaagactgacggcattcctataactatcagagttacatcaaacgggttgtattgttattttacacatcttggttatattattagatatcctgttaagagaataatagattccgaagtagtagtctttggtgaggcagttaaggataagaactggaccgtatatctcattaagctaatagagcctgtgaatgcaatcaatgatagactagaagaaagtaagtatgttgaatctaaactagtggatatttgtgatcggatagtattcaagtcaaagaaatacgaaggtccgtttactacaactagtgaagtcgtcgatatgttatctacatatttaccaaagcaaccagaaggtgttattctgttctattcaaagggacctaaatctaacattgattttaaaattaaaaaggaaaatactatagaccaaactgcaaatgtagtatttaggtacatgtccagtgaaccaattatctttggagaatcgtctatctttgtagagtataagaaatttagcaacgataaaggctttcctaaagaatatggttctggtaagattgtgttatataacggcgttaattatctaaataatatctattgtttggaatatattaatacacataatgaagtgggtattaagtccgtggttgtacctattaagtttatagcagaattcttagttaatggagaaatacttaaacctagaattgataaaaccatgaaatatattaactcagaagattattatggaaatcaacataatatcatagtcgaacatttaagagatcaaagcatcaaaataggagatatctttaacgaggataaactatcggatgtgggacatcaatacgccaataatgataaatttagattaaatccagaagttagttattttacgaataaacgaactagaggaccgttgggaattttatcaaactacgtcaagactcttcttatttctatgtattgttccaaaacatttttagacgattccaacaaacgaaaggtattggcgattgattttggaaacggtgctgacctggaaaaatacttttatggagagattgcgttattggtagcgacggatccggatgctgatgctatagctagaggaaatgaaagatacaacaaattaaactctggaattaaaaccaagtactacaaatttgactacattcaggaaactattcgatccgatacatttgtctctagtgtcagagaagtattctattttggaaagtttaatatcatcgactggcagtttgctatccattattcttttcatccgagacattatgctaccgtcatgaataacttatccgaactaactgcttctggaggcaaggtattaatcactaccatggacggagacaaattatcaaaattaacagataaaaagacttttataattcataagaatttacctagtagcgaaaactatatgtctgtagaaaaaatagctgatgatagaatagtggtatataatccatcaacaatgtctactccaatgactgaatacattatcaaaaagaacgatatagtcagagtgtttaacgaatacggatttgttcttgtagataacgttgatttcgctacaattatagaacgaagtaaaaagtttattaatggcgcatctacaatggaagatagaccgtctacaaaaaactttttcgaactaaatagaggagccattaaatgtgaaggtttagatgtcgaagacttacttagttactatgttgtttatgtcttttctaagcggtaaataataatatggtatgggttctgatctcccagttctaaatgcattaaataattccaatagagcgatttttgttcctataggaccttccaactgtggatactctgtattgttaatagatatattaatacttttgtcgggtaacagaggttctacgtcttctaaaaataaaagttttataacatctggcctgttcataaataaaaacttggcgattctatatatactcttattatcaaatctagccattgtcttatagatgtgagctactgtaggtgtaccatttgattttctttctaatactatatatttctctcgaagaagttcttgcacatcatctgggaataaaatactactgttgagtaaatcagttattttttttatatcgatattgatggacatttttatagttaaggataataagtatcccaaagtcgataacgacgataacgaagtatttatacttttaggaaatcacaatgactttatcagattaaaattaacaaaattaaaggagcatgtatttttttctgaatatattgtgactccagatacatatggatctttatgcgtcgaattaaatgggtctagttttcagcacggcggtagatatatagaggtggaggaatttatagatgctggaagacaagttagatggtgttctacatccaatcatatatctaaagatatacccgaagatatgcacactgataaatttgtcatttatgatatttatacgtttgattcgttcaagaataaacgattggtattcgtacaggtacctccgtcgttaggagatgatagtcatttgactaatccgttattgtcaccgtattatcgtaattcagtagccagacaaatggtcaatgatatgatttttaatcaagattcatttttaaaatatttattagaacatctgattagaagccactatagagtttctaaacatataacaatagttagatacaaggataccgaagaattaaatctaacgagaatatgttataatagagataagtttaaggcgtttgtattcgcttggtttaacggcgtttcggaaaatgaaaaggtactagatacgtataaaaaggtatctaatttgatataatgaattcagtgactgtatcacacgcgccatatactattacttatcacgatgattgggaaccagtaatgagtcaattggtagagttttataacgaagtagccagttggctgctacgagacgagacgtcgcctattcctgataagttctttatacagttgaaacaaccgcttagaaataaacgagtatgtgtgtgtggtatagatccgtatccgaaagatggaactggtgtaccgttcgaatcaccaaattttacaaaaaaatcaattaaggagatagcttcatctatatctagattaaccggagtaattgattataaaggttataaccttaatataatagacggggttataccctggaattattacttaagttgtaaattaggagaaacaaaaagtcacgcgatttactgggataagatttccaagttactgctgcagcatataactaaacacgttagtgttctttattgtttgggtaaaacagatttctcgaatatacgggccaagttagaatccccggtaactaccatagtcggatatcatccagcggctagagaccgccaattcgagaaagatagatcatttgaaattatcaacgttttactggaattagacaacaaggcacctataaattgggctcaagggtttatttattaatgctttagtgaaattttaacttgtgttctaaatggatgcggctattagaggtaatgatgttatctttgttcttaagactataggtgtcccgtcagcgtgcagacaaaatgaagatccaagatttgtagaagcatttaaatgcgacgagttagaaagatatattgagaataatccagaatgtacactattcgaaagtcttagggatgaggaagcatactctatagtcagaattttcatggatgtagatttagacgcgtgtctagacgaaatagattatttaacggccattcaagattttattatcgaggtgtcaaactgtgtagctagattcgcgtttacagaatgcggcgccattcatgaaaatgtaataaaatccatgagatctaatttttcattgactaagtctacaaatagagataaaacaagttttcatattatctttttagatacgtataccactatggatacattgatagctatgaaacgaacactattagaattaagtagatcatctgaaaatccactaaccagatcgatagacactgccgtatataggagaaaaacaactcttcgggttgtaggtactaggaaaaatccaaattgcgacactattcatgtaatgcaaccaccgcatgataatatagaagattacctattcacttacgtggatatgaacaacaatagttattacttttctctacaacaacgattggaggatttagttcctgataagttatgggaaccagggtttatttcattcgaagacgctataaaaagagtttcaaaaatattcattaattctataataaactttaatgatctcgatgaaaataattttacaacggtaccactggtcatagattacgtaacaccttgtgcattatgtaaaaaacgatcgcataaacatccgcatcaactatcgttggaaaatggtgctattagaatttacaaaactggtaatccacatagttgtaaagttaaaattgttccgttggatggtaataaactgtttaatattgcacaaagaattttagacactaactctgttttattaaccgaacgaggagaccatatagtttggattaataattcatggaaatttaacagcgaagaacccttgataacaaaactaattttgtcaataagacatcaactacctaaggaatattcaagcgaattactctgtccaagaaaacgaaagactgtagaagctaacatacgagacatgttagtagattcagtggagaccgatacctatccggataaacttccgtttaaaaatggtgtattggacctggtagacggaatgttttactctggagatgatgctaaaaaatatacgtgtactgtatcaaccggatttaaatttgacgatacaaagttcgtcgaagacagtccagaaatggaagagttaatgaatatcattaacgatatccaaccattaacggatgaaaataagaaaaatagagagctatatgaaaaaacattatctagttgtttatgcggtgctaccaaaggatgtttaacattcttttttggagaaactgcaactggaaagtcgacaaccaaacgtttgttaaagtctgctatcggtgacctgtttgttgagacgggtcaaacaattttaacagatgtattggataaaggacctaatccatttatcgctaacatgcatttgaaaagatctgtattctgtagcgaactacctgattttgcctgtagtggatcaaagaaaattagatctgacaatattaaaaagttgacagaaccttgtgtcattggaagaccgtgtttctccaataaaattaataatagaaaccatgcgacaatcattatcgatactaattacaaacctgtttttgataggatagataacgcattaatgagaagaattgccgtcgtgcgattcagaacacacttttctcaaccttctggtagagaggctgctgaaaataatgacgcgtacgataaagtcaaactattagacgaggggttagatggtaaaatacaaaataatatatatagatttgcatttctatacttgttggtgaaatggtacaaaaaatatcatgttcctattatgaaactatatcctacacccgaagagattcctgactttgcattctatctcaaaataggtactctgttggtatctagctctgtaaagcatattccattaatgacggacctctccaaaaagggatatatattgtacgataatgtggtcactcttccgttgactactttccaacagaaaatatccaagtattttaattctagactatttggacacgatatagagagcttcatcaatagacataagaaatttgccaatgttagtgatgaatatctgcaatatatattcatagaggatatttcatctccgtaaatatatgctcatatatttatagaagatatcacatatctaaatgaataccggaatcatagatttatttgataatcatgttgatagtataccaactatattacctcatcagttagctactctagattatctagttagaactatcatagatgagaacagaagcgtgttattgttccatattatgggatcaggtaaaacaataatcgctttgttgttcgccttggtagcttccagatttaaaaaggtttacattctagtgccgaacatcaacatcttaaaaattttcaattataatatgggtgtagctatgaacttgtttaatgacgaattcatagctgagaatatctttattcattccacaacaagtttttattctcttaattataacgataacgtcattaattataacggattatctcgctacaataactctatttttatcgttgatgaggcacataatatctttgggaataatactggagaacttatgaccgtgataaaaaataaaaacaagattccttttttactattgtctggatctcccattactaacacacctaatactctgggtcatattatagatttaatgtccgaagagacgatagattttggtgaaattattagtcgtggtaagaaagtaattcagacacttcttaacgaacgcggtgtgaatgtacttaaggatttgcttaaaggaagaatatcatattacgaaatgcctgataaagatctaccaacgataagatatcacggacgtaagtttctagatactagagtagtatattgtcacatgtctaaacttcaagagagagattatatgattactagacgacagctatgttatcatgaaatgtttgataaaaatatgtataacgtgtcaatggcagtattgggacaacttaatctgatgaataatttagatactttatttcaggaacaggataaggaattgtacccaaatctgaaaataaataatggcgtgttatacggagaagaattggtaacgttaaacattagttccaaatttaaatactttattaatcggatacagacactcaacggaaaacattttatatacttttctaattctacatatggcggattggtaattaaatatatcatgctcagtaatggatattctgaatataatggttctcagggaactaatccacatatgataaacggcaaaccaaaaacatttgctatcgttactagtaaaatgaaatcgtctttagaggatctattagatgtgtataattctcctgaaaacgatgatggtagtcaattgatgtttttgttttcatcaaacattatgtccgaatcctatactctaaaagaggtaaggcatatttggtttatgactatcccagatactttttctcaatacaaccaaattcttggacgatctattagaaaattctcttacgccgatatttctgaaccagttaatgtatatcttttagccgccgtatattccgatttcaatgacgaagtgacgtcattaaacgattacacacaggatgaattaattaatgttttaccatttgacatcaaaaagctgttgtatctaaaatttaagacgaaagaaacgaatagaatatactctattcttcaagagatgtctgaaacgtattctcttccaccacatccatcaattgtaaaagttttattgggagaattggtcagacaatttttttataataattctcgtattaagtataacgataccaagttacttaaaatggttacatcagttataaaaaataaagaagacgctaggaattacatagatgatattgtaaacggtcacttctttgtatcgaataaagtatttgataaatctcttttatacaaatacgaaaacgatattattacagtaccgtttagactttcctacgaaccatttgtttggggagttaactttcgtaaagaatataacgtggtatcttctccataaaactgatgagatatataaagaaataaatgtcgagctttgttaccaatggatacctttccgttacattggaaccacacgagctgacgttagacataaaaactaatattaggaatgccgtatataagacgtatctccatagagaaattagtggtaaaatggccaagaaaatagaaattcgtgaagacgtggaattacctctcggcgaaatagttaataattctgtagttataaacgttccgtgtgtaataacctacgcgtattatcacgttggggatatagtcagaggaacattaaacatcgaagatgaatcaaatgtaactattcaatgtggagatttaatctgtaaactaagtagagattcgggtactgtatcatttagcgattcaaagtactgcttttttcgaaatggtaatgcgtatgacaatggcagcgaagtcactgccgttctaatggaggctcaacaaggtatcgaatctagttttgtttttctcgcgaatatcgtcgactcataaaaaagagaatagcggtaagtataaacacgaatactatggcaataattgcgaatgttttattctcttcgatatatttttgataatatgaaaaacatgtctctctcaaatcggacaaccatctcataaaatagttctcgcgcgctggagaggtagttgccgctcgtataatctctccagaataatatacttgcgtgtcgtcgttcaatttatacggatttctatagttctctgttatataatgcggtttgccctcatgattagacgacgacaatagtgttctaaatttagatagttgatcagaatgaatgtttattggcgttggaaaaattatccatacagcgtctgcagagtggttgatagttgttcctagatatgtaaaataatccaacttactaggcagcaaattgtctagataaaatactgaatcaaacggtgcagacgtattggcggatctaatggaatccaattgattaactatcttttgaaaatatacatttttatgatccaatacttgtaagaatatagaaataatgataagtccatcatcgtgtttttttgcctcttcataagaactatattttttcttattccaatgaacaagattaatctctccagagtatttgtacacatctatcaagtgattggatccataatcgtcttcctttccccaatatatatgtagtgatgataacacatattcattggggagaaaccctccacttatatatcctcctttaaaattaatccttactagttttccagtgttctggatagtggttggtttcgactcattataatgtatgtctaacggcttcaatcgcgcgttagaaattgcttttttagtttctatattaataggagatagttgttgcggcatagtaaaaatgaaatgataactgtttaaaaatagctcttagtatgggaattacaatggatgaggaagtgatatttgaaactcctagagaattaatatctattaaacgaataaaagatattccaagatcaaaagacacgcatgtgtttgctgcgtgtataacaagtgacggatatccgttaataggagctagaagaacttcattcgcgttccaggcgatattatctcaacaaaattcagattctatctttagagtatccactaaactattacggtttatgtactacaatgaactaagagaaatctttagacggttgagaaaaggttctatcaacaatatcgatcctcactttgaagagttaatattattgggtggtaaactagataaaaaggaatctattaaagattgtttaagaagagaattaaaagaggaaagtgatgaacgtataacagtaaaagaatttggaaatgtaattctaaaacttacaacacgggataaattatttaataaagtatatataagttattgcatggcgtgttttattaatcaatcgttggaggatttatcgcatactagtatttacaatgtagaaattagaaagattaaatcattaaatgattgtattaacgacgataaatacgaatatctgtcttatatttataatatgctagttaatagtaaatgaacttttacagatctagtataattagtcagattattaagtataatagacgactagctaagtctattatttgcgaggatgactctcaaattattacactcacggcattcgttaaccaatgcctatggtgtcataaacgagtatccgtgtccgctattttattaactactgataacaaaatattagtatgtaacagacgagatagttttctctattctgaaataattagaactagaaacatgtttagaaagaaacgattatttctgaattattccaattatttgaacaaacaggaaagaagtatactatcgtcatttttttctctagatccagctactactgataatgatagaatagacgctatttatccgggtggcatacccaaaaggggtgagaatgttccagagtgtttatccagggaaattaaagaagaagttaatatagacaattcttttgtattcatagacactcggttttttattcatggcatcatagaagataccattattaataaattttttgaggtaatcttctttgtcggaagaatatctctaacgagtgatcaaatcattgatacatttaaaagtaatcatgaaatcaaggatctaatatttttagatccgaattcaggtaatggactccaatacgaaattgcaaaatatgctctagatactgcaaaacttaaatgttacggccatagaggatgttattatgaatcattaaaaaaattaactgaggatgattgattaaaaaatataaattaatttaccatcgtgtatttttataacgggattgtccggcatatcatgtagatagttaccgtctacatcgtatactcgaccatctacgcctttaaatcctctatttattgacattaatctattagaattggaataccaaatattagtaccctcaattagtttattggtaatattttttttagacgatagatcgatggctcttgaaaccaaggttttccaaccggactcattgtcgatcggtgagaagtctttttcattagcatgaatccattctaatgatgtatgtttaaacactctaaacaattggacaaattcttttgatttgctttgaatgatttcaaataggtcttcgtctacagtaggcataccattagataatctagccattataaagtgcacgtttacatatctacgttctggaggagtaagaacgtgactattgagacgaatggctcttcctactatctgacgaagagacgcctcgttccatgtcatatctaaaatgaagatatcattaattgagaaaaaactaataccctcgcctccactagaagagaatacgcatgttttaatgcattctccgttagtgtttgattcttggttaaactcagccaccgccttgattctagtatcttttgttctagatgagaactctatattagagataccaaagactttgaaatatagtaataagatttctattcctgactgattaacaaatggttcaaagactagacatttaccatgggatgctaatattcccaaacatacatctataaatttgacgcttttctcttttaattcagtaaatagagagatatcagccgcactagcatcccctttcaatagttctccctttttaaaggtatctaatgcggatttagaaaactctctatctcttaatgaatttttaaaatcattatatagtgttgctatctcttgcgcgtattcgcccggatcacgattttgtctttcaggaaagctatcgaacgtaaacgtagtagccatacgtctcagaattctaaatgatgatatacctgtttttatttcagcgagtttagccttttgataaatttcttcttgctttttcgacatattaacgtatcgcattaatactgttttcttagcgaatgatgcagacccttctacgtcatcaaaaatagaaaactcgttattaactatatacgaacatagtcctcctagtttggagactaattctttttcatcgactagacgtttattctcaaatagcgattggtgttgtaaggatcctggtcgtagtaagttaaccaacatggtgaattcttgcacactattgacgataggtgtagccgataaacaaatcatcttatggttttttaacgcaatggtcttagataaaaaattatatactgaacgagtaggacggatcttaccatcttctttgattaatgatttagaaatgaagttatgacattcatcaataatgacgcatattctactcttggaattaatagttttgatattagtaaaaaatttatttctaaaattttgatcatcgtaattaataaaaatacaatccttcgttatctctggagcgtatctgagtatagtgttcatccaaggatcttctatcaaagcctttttcaccaataagataatagcccaattcgtataaatatccttaagatgtttgagaatatatacagtagtcattgttttaccgacacccgtttcatggaacaataaaagagaatgcatactgtctaatcctaagaaaactcttgctacaaaatgttgataatccttgaggcgtactacgtccgaccccatcatttcaacgggcatattagtagttctgcgtaaggcataatcgatataggccgcgtgtgatttactcatttatgagtgataagtaataactatgttttaaaaatcacagcagtagtttaactagtcttctctgatgtttgttttcgatactttttgaatcagaagtcatactagaataaagcaacgagtgaacgtaatagagagcttcgtatactctattcgaaaactctaagaacttattaatgaattccgtatccactggattgtttaaaatactaaattgaacactgttcacatccttccaagaagaagacttagtgacggacttaacatgagacataaataaatccaaattttttttacaaacatcactagccaccataatggcgctatctttcaaccagctatcgcttacgcattttagcagtctaacatttttaaagagactacaatatattctcatagtatcgattacacctctaccgaataaagttggaagtttaataatacaatatttttcgtttacaaaatcaaataatggtcgaaacacgtcgaaggttaacatcttataatcgctaatgtatagattgttttcagtgagatgattattagatttaatagcatctcgttcacgtttgaacagtttattgcgtgcgctgaggtcggcaactacggcgtccgctttagtactcctcccataatactttacgctattaatctttaaaatttcatagactttatctagatcgctttctggtaacatgatatcatgtgtaaaaagttttaacatgtcggtcggcattctatttagatcattaactctagaaatctgaagaaagtaattagctccgtattccagactaggtaatgggcttttacctagagacagattaagttctggcaatgtttcataaaatggaagaaggacatgcgttccctcccggatattttttacaatttcatccatttacaactctatagtttgttttcattattattagttattatctcccataatcttggtaatacttaccccttgatcgtaagataccttatacaggtcattacatacaactaccaattgtttttgtacataatagattggatggttgacatccatggtggaataaactactcgaacagatagtttatctttccccctagatacattagccgtaatagttgtcggcctaaagaatatctttggtgtaaagttaaaagttagggttcttgttccattattgctttttgtcagtagttcattataaattctcgagatgggtccgttctctgaatatagaacatcatttccaaatctaacttctagtctagaaataatatcggtcttattcttaaaatctattcccttgatgaagggatcgttaatgaacaaatccttggcctttgattcggctgatctattatctccgttatagacgttacgttgactagtccaaagacttacaggaatagatgtatcgatgatgttgatactatgtgatatgtgagcaaagattgttctcttagtggcatcactatatgttccagtaatggcggaaaactttttagaaatgttatatataaaagaattttttcgtgttccaaacattagcagattagtatgaagataaacactcatattatcaggaacattatcaatttttacatacacatcagcatcttgaatagaaacgataccatcttctggaacctctacgatctcggcagactccggataaccagtcggtgggccatcgctaacaataactagatcatccaacaatctactcacatatgcatctatataatctttttcatcttgtgagtaccctggatacgaaataaatttattatccgtatttccataataaggtttagtataaacagagagagatgttgccgcatgaacttcagttacagtcgccgttggttggtttatttgacctattactctcctaggtttctctataaacgatggtttaatttgtacattcttaaccatatatccaataaagctcaattcaggaacataaacaaattctttgttgaacgtttcaaagtcgaacgaagagtcacgaataacgatatcggatactggattgaaggttaccgttacggtaatttttgaatcggatagtttaagactgctgaatgtatcttccacatcaaacggagttttaatataaacgtatactgtagatggttctttaatagtgtcattaggagttaggccaatagaaatatcattaagttcactagaatatccagagtgtttcaaagcaattgtattattgatacaattattatataattcttcgccctcaatttcccaaataacaccgttacacgaagagatagatacgtgattaatacatttatatccaacatatggtacgtaactgaatcttcccatacctttaacttctggaagttccaaactcagaaccaaatgattaagcgcagtaatatactgatccctaatttcgaagctagcgatagcctgattgtctggaccatcgtttgtcataactccggatagagaaatatattgcggcatatacaaagttggaatttgactatcgactgcgaagacattagaccgtttaatagagtcatccccaccgatcaaagaattaatgatagtattattcattttctatttaaaatggaaaaagcttacaataaactccgtagagaaatatctataatttgtgagttttccttaaagtaacagcttccgtaaacgccgtctttatctcttagtaggtttattgtatttatgaccttttccttatcttcatagaatactaaaggcaacaaagaaatttttggttcttctctaagagctacgtgagacttaaccatagaagccaacgaatccctacatattttagaacagaaataccctacttcaccacccttgtatgtctcaatactaataggtctaaaaaccaaatcttgattacaaaaccaacacttatcaattacactatttgtcttaatagacacatctgccatagatttataatactttggtagtatacaagcgagtgcttcttctttagcgggcttaaagactgctttaggtgctgaaataaccacatctggaaggcttactcgcttagccatttaattacggaactatttttttatacttctaatgagcaagtagaaaacctctcatctacaaaaacgtactcgtgtccataatcctctaccatagttacacgttttttagatctcatatgtgctaaaaagttttcccatactaattggttactattatttttcgtataatttttaacagtttgaggttttagatttttagttacagaagtgatatcgaatattttatccaaaaagaatgaataattaattgtcttagaaggagtgttttcttggcaaaagaataccaagtgcttaaatatttctactacttcattaatcttttctgtactcagattcagtttctcatcttttacttgattgattatttcaaagactaacttataatcctttttatttattctctcgttagccttaagaaaactagatacaaaatttgcatctacatcatccgtggatatttgatttttttccatgatatccaagagttccgagataatttctccagaacattgatgagacaataatctccgcaatacatttctcaaatgaataagtttattagacacgtggaagtttgactttttttgtacctttgtacatttttgaaataccgactcgcaaaaaatacaatattcatatccttgttcagatactataccgttatgtctacaaccgctacataatcgtagattcatgttaacactctacgtatctcgtcgtccaatattttatataaaaacattttatttctagacgttgccagaaaatcctgtaatatttttagttttttgggctgtgaataaagtatcgccctaatattgttaccgtcttccgccaatatagtagttaaattatccgcacatgcagaagaacaccgcttaggcggattcagtacaatgttatatttttcgtaccaactcatttaaatatcataatctaaaatagttctgtaatatgtctagcgctaatatattgatcataatcctgtgcataaattaagatacaacaatgtctcgaaatcatcgacatggcttcttccatagttagaagatcgtcgtcaaagttagcaacgtgattcatcaacatttgctgttttgaggcagcaaatactgaaccgtcgccattcaaccattcataaaaaccatcgtctgaatccattgataatttcttgtactggtttttgagagctcgcatcaatctagcatttctagctcccggattgaaaacagaaagaggatcgtacatccagggtccattttctgtaaatagaatcgtataatgtcccttcaagaagatatcagacgatccacaatcaaagaattggtctccgagtttgtaacaaactgcggactttaacctatacatgataccgtttagcataatttctggtgatacgtcaatcggagtatcatctattagagatctaaagccggtgtaacattctccaccaaacatattcttattctgacgtcgttctacataaaacatcattgctccattaacgataacaggggaatgaacagcactacccatcacattagttcccaatggatcaatgtgtgtaactccagaacatcttccatagcctatgttaggaggagcgaacaccactcttccactattgccatcgaatgccatagaataaatatccttggaattgatagaaatcggactgtcggatgttgtgatcatcttcataggattaacaactatgtatggtgccgcctgaagtttcatatcgtaactgatgccgtttataggtctagccacagaaaccaacgtaggtctaaatccaactatagacaaaatagaagccaatatctgttcctcatctgtcataacttgagagcatccagtatgaataatcttcattagatggggatctaccgcatcatcatcgttacaataaaaaattcccattctaatgttcataattgcttttctaatcatggtatgcatgtttgctctctgaatctctgtggaaattagatctgatacacctgtaatcactatcggattatcctccgtaagacgattaaccaacaacatataattataagactttacttttctaaattcataaagttgctggattaggctataggtgtctccatgtacatacgcgttctcgagcgcaggaagtttaataccgaatagtgccatcagaataggatgaatatagtaattagtttctggttttctataaataaaagacaaatcttgtgaactagacatatcggtaaaatgcatggattggaatcgtgtagtcgacagaagaatatgatgattagatggagagtatattttatctaactctttgagttggtcaccgattctaggactagctcgagaatgaataagtactaaaggatgagtacatttcacagaaacactagcattgttcaatgtgctctttacatgggtaaggagttgaaatagctcgtttctatttgttctgacaatatttagtttattcataatgttaagcatatcctgaatagtaaagttagatgtgtcatacttgttagtagttagatatttagcaattgcattcccatcatttctcaatctcgtactccaatcatgcgtggatgctacttcgtcgatggaaaccatacaatcctttttgataggctgttgagattgatcatttcctgcacgtttaggtttggtacgttgatttctagcccctgcggatataaagtcatcgtctacaatttgggacaatgaattgcatacactacaagacaaagatttatcagaagtgtgaatatgatcttcatctaccaaagaaagagtttgattagtataactagattttagtcctgcgttagatgttaaaaaaacatcgctattgaccacggcttccattatttatattcgtagtttttactcgaaagcgtgattttaatatccaatcttattacttttggaatcgttcaaaacctttgactagttgtagaatttgatctattgccctacgcgtatactcccttgcatcatatacgttcgtcaccagatcgtttgtttcggcctgaagttggtgcatatctctttcaacattcgacatgagatccttaagggccatatcgtctagattttgttgagatgctgctcctggatttggattttgttgtgctgttgtacatactgtaccaccagtaggtgtaggagtacatacagtggccacaataggaggttgagaaagtgtaaccgttggagtagtacaagaaatacttccatccgattgttgtgtacatgtagttgttggtaacgtctgagaaggttgggtagatggcggcgtcgtcgttttttgatctttattaaatttagagataatatcctgaacagcattgctcggcgtcaacgctggaaggagtgaactcgccggcgcatcagtatcttcagacagccaatcaaaaagattagacatatcagatgatgtattagtttgttgtcgtggttttggtgtaggagcagtactactaggtagaagaataggagccgatgtagctgttggaaccggctgtggagttatatgaatagttggttgtagcggttggataggctgtctgctggcggccatcatattatctctagctagttgttctcgcaactgtctttgataatacgactcttgagactttagtcctatttcaatcgcttcatcctttttcgtatccggatccttttcttcagaataatagattgacgactttggtgtagaggattctgccagcctctgtgagaacttgttaaagaagtccatttaaggctttaaaattgaattgcgattataagattaaatggcagacacagacgatattatcgactatgaatccgatgatctcaccgaatacgaggatgatgaagaagaggaagaagatggagagtcactagaaactagtgatatagatcccaaatcttcttataagattgtagaatcagcatccactcatatagaagatgcgcattccaatcttaaacatatagggaatcatatatctgctcttaaacgacgctatactagacgtataagtctatttgaaatagcgggtataatagcagaaagctataacttgcttcaacgaggaagattacctctagtttcagaattttctgacgaaacgatgaagcaaaatatgctacatgtaattatacaagagatagaggagggttcttgtcctatagtcatcgaaaagaacggagaattgttgtcggtaaacgattttgacaaagatggtctaaaattccatctagactatattatcaaaatttggaaacttcaaaaacgatattagaatttatacgaatatcgttctctaaatgtcacaatcaagtctcgcatgttcagcaatttattgtcgtactttatatcgtgttcattaacgatatcttgcaaaatagtaatgattctatcttccttcgatagatattcttcagagattattgtcttatattctttcttgttatcagatatgaatttgataagactttgaacattattgatacccgtctgtttaattttttctacagatattttagttttggcagattctatcgtatctgtcaatagacatccaacatcgacattcgacgtcaattgtctataaatcaacgtataaattttagaaataacattagcgaattgttgtgcgttgatgtcgttattctgaaacagtatgattttaggtagcattttcttaacaaagagaacgtatttattgttactcagttgaacagatgatatatccagattactaacgcatctgattccgtataccaaactttcagaagaaatggtatacaattgtttgtattcattcaatgtctctttttcagaaattagtttagagtcgaatactgcaataattttcaagagatagttttcatcagataagattttatttagtgtagatatgataaaactattgttttgttggagaacttgatacgccgcgttctctgtagtcgacgctctcaaatgggaaacaatctccattatttttttggaatcggatactatatcttcggtatcttgacgcagtctagtatacatagagttaagagagattagagtttgtacattaagcaacatgtctctaaatgtggctacaaacttttcctttttcacatcatctagtttattatataccgatttcacaacggcaccagatttaaggaaccagaatgaaaaactctgataactacaatatttcatcatagttacgattttatcatcttctatagttggtgtaatagcgcatacctttttctccaagactggaaccaacgtcataaaaatgtttaaatcaaaatccatatcaacatctgatgcgctaagaccagtctcgcgttcaagattatctttactaatggtgacgaactcatcgtataaaactctaagtttgtccattatttatttacagatttagttgtttaatttatttgtgctcttccagagttgggatagtatttttctaacgtcggtattatattattaggatctacgttcatatgtatcataatattaatcatccacgttttgataaatctatctttagcttctgaaataacgtatttaaacaaaggagaaaaatatttagctacggcatcagacgcaataacattttttgtaaatgtaacgtatttagacgacagatcttcgttaaaaagttttccatctatgtagaatccatcggttgttaacaccattcccgcgtcagattgaataggagtttgaatagtttgttttggaaatagatccttcaataacttatagttgggtgggaaaaaatcgattttatcactagactctttcttttttactatcattacctcatgaactatttcttgaatgagtatatgtattttctttcctatatcggacgcgttcattggaaaatataccatgtcgttaactataagaatatttttatcctcgtttacaaactgaataatatcagatgtagttcgtaaacgaactatatcatcaccagcacaacatctaactatatgatatccactagtttcctttagccgtttattatcttgttccatattagcagtcattccatcatttaagaaggcgtcaaaaataatagggagaaatgacattttggattctgttacaactttaccaaaattaaggatatacggacttactatctttttctcaacgtcaatttgatgaacacacgatgaaaatgtgcttctatgagattgatcatgtagaaaacaacaagggatacaatatttccgcatatcatgaaatatattaagaaatcccaccttattatatttccccaaaggatccatgcacgtaaacattatgccgttatcattaataaagacttctttctcatcggatctgtaaaagttgttactgatttttttcattccaggatctagataattaataatgatgggttttctattcttattctttgtattttggcatatcctagaccagtaaacagtttccactttggtaaaatcagcagacttttgaacgctattaaacatggcattaatggcaataactaaaaatgtaaaatatttttctatgttaggaatatggtttttcactttaatagatatatggtttttggccaaaatgatagatatttttttatccgaggatagtaaaatattattagtcgccgtctctataaaaatgaagctagtctcgatatccaattttattctagaattgataggagtcgccaaatgtaccttatacgttatatctcccttgatgcgttccatttgtgtatctatatcggacacaagatctgtaaatagttttacgttattaatcatcacggtatcgccgtcgctagataacgctaatgtaccatccaagtcccaaatggagagatttaactgttcatcgtttagaataaaatgattaccggtcatattaataaagtgttcatcgtatctagataacaacgacttataattaatgtccaagtcttgaactcgctgaatgatcttttttaacccagttagttttagattggtacgaaatatattgttaaactttgattctacagtaatgtccaaatctagttgtggaaatacttccatcaacattgtttcaaacttgataatattattatctacatcttcgtacgatccaaattccggaatagatgtatcgcacgctctggccacccagataaccaaaaagtcacacgctccaggatatacattgtataaaaagctatcgttttttagtagggtttttttctgcgtgtatacgaagggattaaaaatagtattatcaacgtaactatattccaaattattcttatgagaatagataataatatcgtccttaatatctaacaaatttcctaaatatccctttaattgagtcattcgaagcgtcaatagaatatgtctcttaactatttccggctgttgtatatttaaatgacttcgtaaaaaataatatatgggcgacttctcatctatgtaatcatatggagtgagatatagggctcgttctacctcctgccccttacccacctgtaataccaattgcggacttactatatatcgcatatttatatcgtggggtaaagtgaaaatctactaccgatgatgtaagtcttacaatgttcgaaccagtaccagatcttaatttggaggcctccgtagaactaggggaggtaaatatagatcaaacaacacctatgataaaggagaatagcggttttatatcccgcagtagacgtctattcgcccatagatctaaggatgatgagagaaaactagcactacgattctttttacaaagactttattttttagatcatagagagattcattatttgttcagatgcgttgacgctgtaaaagacgtcactattaccaaaaaaaataacattatcgtggcgccttatatagcacttttaactatcgcatcaaaaggatgcaaacttacagaaacaatgattgaagcattctttccagaactatataatgaacatagtaagaaatttaaattcaactctcaagtatccatcatccaagaaaaactcggataccagtttggaaactatcacgtttatgattttgaaccgtattactctacagtagctctggctattcgagatgaacattcatctggcatttttaatatccgtcaagagagttatctggtaagttcattatctgaaataacatatagattttatctaattaatctaaaatctgatcttgttcaatggagtgctagtacgggcgctgtaattaatcaaatggtaaatactgtattgattacagtgtatgaaaagttacaactggtcatagaaaatgattcacaatttacatgttcattggctgtggaatcaaaacttccaataaaattacttaaagatagaaatgaattatttacaaaattcattaacgagttaaaaaagaccagttcattcaagataagcaaacgcgataaggatacgctactaaaatattttacttaggactggagttagaatttatagacgactcatttcgtttatcattgttactattattactattactatcattattagtgttggcattattagtattcttcttgtcatcttgttcagaaatatacagcaatgctatacctaatactaaatacattatcatgctcgcaatggctctaacaacaacgaaccaaaatgaatttggtcgtagcttttgttcacaaaaatacataaagaaatgtctacataaatctatggcgccattggctacttgaaatagcgccagtcctcctacagattttaatatagctgtataacatgacatttattcatcatcaaaagagacagagtcaccatctgtcatatttagattttttttcatgtgttcaaagtatcctctactcatttcattataatagtttatcatacttagaattttaggacggatcaatgagtaagacttgactagatcgtcagtagtaatttgtgcatcgtctattctgcatccgcttcgtcgaataatgtatagcatcgctttgagattctccatagctatcaagtctttatacaatgacatggaaatatctgtgaatactttatacttctccaacatcgatgccttaacatcatcgcctactttagcattgaaaatacgttctattgtgtagatggatgtagcaagatttttaaacaacaatgccatcttacacgatgattgcctcaagtctccaatcgtttgtttagaacgattagctacagagtccaatgcttggctgactagcatattattatctttagaaattgtattcttcaatgaggcgtttatcatatctgtgatttcgttagtcatattacagtctgactgggttgtaatgttatccaacatatcacctatggatacggtacacgtaccagcatttgtaataatcctatctaagatgttgtatggcattgcgcagaaaatatcttctcctgtaatatctccactctcgataaatctactcagattattcttaaatgccttattctctggagaaaagatatcagtgtccatcatttcattaatagtatacgcagaaaagataccacgagtatcaattctatccaagatacttatcggttccgagtcacagataatggtttcctctccttcgggagatcctgcatagaaatatctaggacaatagtttctatactgtctgtaactctgataatctctaaagtcactaactgataccatgaaattgagaagatcaaacgctgaagtaattaatttttctgcctcgtttttactacaactagttttcatcaatgtagtgacgatgtattgtttagttacttttggtctaatactgatgatagagatattattgcttcccataatggatcttctagtagtcaccttaaagcccattgatgcgaatagcagatagataaagtcttggtatgactcctttctaatatagtacggactacctttgtcacccaactttatacccacataagccataacaacctctttaatagccgtttcatgaggtttatcagccatgagcctgagtagttggaagaatctcatgaatcccgtctcagaaagtcctatatgcatgatagatttatctttcctgggaaactctcgtatagtcatagatgaaatactctttaaagtttctgaaataagattagtaacagtcttacctccgactactctaggtaacaaacaaactctaataggtgttttctctgcggagataatatcagaaaggatagagcaataagtagtattattgtgattataaagaccgaatacataacaggtagaatttataaacatcatgtcctgaaggtttttagacttgtattcctcgtaatccataccgtcccaaaacatggatttggtaactttgatagccgtagatctttgttccttcgccaacaggttaaagaaattaataaagaatttgttgtttctatttatgtccacaaattgcacgtttggaagcgccacggttacattcactgcagcattttgaggatcgcgagtatgaagtacgatgttattgtttactggtatatctggaaagaaatctaccagtctaggaataagagattgatatcgcatagaaatagtaaagtttataatctcatcatcgaagagcattttgttaccattgtaataaatatccactctgtcatatgtataaatgaagtactgttcaaacatgatgagatgtttatatgttggcatagtagtgagatcgacgtttggtaatggcaatgtattaagattaactccataatgtctagcagcatctgcgatgttataagcgtcgtcaaagcggggtcgatcttgtattgttatatattgtctaacacctataagattatcaaaatcttgtctgcttaatacaccgttaacaatttttgccttgaattcttttattggtgcattaataacatccttatagaggatgttaaacaaataagtgttatcaaagttaagatctggatatttcttttctgctagaacatccattgagtcggagccatctggtttaatataaccaccgataaatctagctctgtattctgtatccgtcaatctaatattaagaaggtgttgagtgaaaggtggaagatcgtaaaagctgtgagtattaatgataggattagtttccgaactaatgttaattggggtattaataatatctatatttccagcgttaagtgtaacattaaacagttttaattcacgtgacgtggtatcaattaaataattaatgcccaatttggatatagcagcctgaagctcatcttgtttagttacggatcctaatgagttattaagcaatatatcgaacggatgaacgaaggttgttttaagttggtcacatactttgtaatctagacatagatgcggaagaacggtagaaactatacgaaataaatattcagagtcctctaattgatcaagagtaactattgacttaataggcatcatttatttagtattaaatgacgaccgtaccagtgacggatatacaaaacgatttaattacagagttttcagaagataattatccatctaacaaaaattatgaaataactcttcgtcaaatgtctattctaactcacgttaacaacgtggtagatagagaacataatgccgccgtagtgtcatctccagaggaaatatcctcacaacttaatgaagatctatttccagatgatgattcaccggccactattatcgaacgagtacaacctcatactactattattgacgatactccacctcctacgtttcgtagagagttattaatatcggaacaacgtcaacaacgagaaaaaagatttaatattacagtatcgaaaaatgctgaagcaataatggaatctagatctatgataacttctatgccaacacaaacaccatccttgggagtagtttatgataaagataaaagaattcagatgttagaggatgaagtggttaatcttagaaatcaacgatctaatacaaaatcatctgataatttagataattttaccaaaatactatttggtaagactccgtacaaatcaacagaagttaataagcgtatagccatcgttaattatgcaaatttgaacgggtcccccttatcagtcgaggacttggatgtttgttcggaggatgaaatagatagaatctataaaacgattaaacaatatcacgaaagtagaaaacgaaaaattatcgtcactaacgtgattattattgtcataaacattatcgagcaggcattgctaaaactcggatttgaagaaatcaaaggactgagtaccgatatcacttcagaaattatcgatgtggagatcggagatgactgcgatgctgtagcatctaaactaggaatcggtaacagtccggttcttaatattgtattgtttatactcaagatattcgttaaacgaattaaaattatttaatttaatacattcccatatccagacaacaatcgtctggattaatctgttcctgtcgtctcataccggacgacatattaatctttttattagtgggcatctttttagatggtttctttttcccagcattaactgagtcgatacctagaagatcgtgattgatctctccgaccattccacgaacttctaattggccgtctctgacggtaccataaactattttaccagcattagtaacagcttggacaatctgaccatccatcgcattgtacgatgtagtagtaactgttgttctacgtctaggagcaccagaagtatttttggagcccttggatgttgatgtagaagaagacgaggattttgattttggtttacatgtaatacattttgaactctttgattttgtatcacatgcgccggcagtcacatctgtttgagaattaagattattgttgcctcctttgacggctgcatctccaccgatttgcgctagtagatttttaagctgtggtgtaatcttattaactgtttcgatataatcatcgtaactgcttctaacggctaaattttttttatccgccatttagaagctaaaaatatttttatttatgcagaagatttaactagattatacaatgaactaatatgatccttttccagattatttacaaacttggtattttttggttctggaggaggcgaatttaaattcggacttggattcggattttgtaagttcttgatcttattatacatcgagtataggatggcgacagtaactgctacacaaataccgatcaaaagaagaataccaatcatttattgacaataacttcactattgatcaagtatgcaatatatcatcttttcactaaataagtagtaataatgattcaacaatgtcgagatatatggacgataataatttagttcatggaaatatcgctatgattggtgtgaatgactccgctaactctgtggggtgcgcagtgctttccccacatagaataaattagcattccgactgtgataataataccaagtataaacgccataatactcaatactttccatgtacgagtgggactggtagacttactaaagtcaataaaggcgaagatacacgaaagaatcaaaagaatgattccagcgattagcacgccggaaaaataatttccaatcataagcatcatgtccatttaactaataaaaattttaaatcgccgaatgaacaaagtggaatataaaccatataaaaacaatagtttgtactgcaaaaataatatctatttttgttttcgaagatatggtaaaattaaatagtagtacacagcatgttataactaacagcagcaacggctcgtaattacttatcatttactagacgaaaaggtggtgggatattttcttgctcaaataatacgaatatatcacccatccattttatgcgatgtttatatactctaatctttaatagatctatagacgacgggtttaccaacaatatagattttatcgattcatctaatttaaacccttccttaaacgtgaatgatctattatctggcataacgatgaccctacctgatgaatcggacaatgtactgggccatgtagaataaattatcaacgaattatcgtctacgaacatttatatcatttgttttaattttaggacgcgaataaatggatataaaatagaaaataacagatattacaaccagtgttatggccgcgcccaaccaggtaggcagttttattttatcttttactacaggttctcctggatgtacgtcaccaacggcggacgtagttctagtacaattagacgtaagttccgcttgggaattttttaacgctaaagagttaacgttaatcgtgcacccaacgtatttacatctagttcgttgaacatcttgattataatataaccattttctatctctagattcgtcagtgcactcatgtaaccaacataccctaggtcctaaatatttatctccggaattagattttggataattcgcgcaccaacaatttctatttcctttatgatcgttacaaaagacgtataatgccgtatccccaaaagtaaaataatcaggacgaataattctaataaactcagaacaatatctcgcatccatatgtttggagcaaatatcggaataagtagacatagccggtttccgttttgcacgtaaccattctaaacaattggggtttccaggatcgtttctacaaaatccagtcatgaaatcgtcacaatgttctgtcttgtaattattattaaatatttttggacagtgtttggtatttgtcttagaacaacattttgccacgctatcactatcgcccaggagataatccttttttataaaatgacatcgttgcccggatgctatataatcagtagcgtgttttaaatccttaatatattcaggagttacctcgttctgataatagattaatgatccaggacgaaatttgaaagaactacatggttctccatgaattaatacatattgtttagcaaattcaggaactataaaactactacaatgatctatcgacataccatctatcaaacaaaacttgggtttaatttctcccggagatgtttcataatagtacgtataactttcttctgcaaacttaacagctctattatattcaggataattaaaacctaattccatatatttgtctcgtatatctgctattcctggtgctattttgattctattaagagtaacagctgcccccattcttaataatcgtcagtatttaaactgttaaatgttggtatatcaacatctaccttatttcccgcagtataaggtttgttgcaggtatactgttcaggaatggttacatttatacttcttctatagtcctgtctttcgatgttcatcacatatgcaaagaacagaataaacaaaataatgtaagaaataatattaaatatctgtgaattcgtaaatacattgattgccataataattacagcagctacaatacacacaatagacattcccacagtgttgccattacctccacgatacatttgagttactaagcaataggtaataactaagctagtaagaggcaatagaaaagatgagataaatatcatcaatatagagattagaggagggctatatagagccaagacgaacaaaatcaaaccgagtaacgttctaacatcattatttttgaagattcccaaataatcattcattcctccataatcgttttgcatcatacctccatctttaggcataaacgattgctgctgttcctctgtaaataaatctttatcaagcactccagcacccgcagagaagtcgtcaagcatattgtaatatcttaaataactcatttatatattaaaaaatgtcactattaaagatggagtataatctttatgccgaactaaaaaaaatgacttgtggtcaacccctaagtctttttaacgaagacggggatttcgtagaagttgaaccgggatcatcctttaagtttctgatacctaagggattttacgcctctccttccgtaaagacgagtctagtattcgagacattaacaacgaccgataataaaatcactagtatcaatccaacaaatgcgccaaagttatatcctcttcaacgcaaagtcgtatctgaagtagtttctaatatgaggaaaatgatcgaatcaaaacgtcctctatacatcactcttcacttggcgtgtggatttggtaagactattaccacgtgttatcttatggctacacacggtagaaaaaccgtcatttgcgtacccaataaaatgttaatacatcaatggaagacacaggtagaggcagtcggattggaacataagatatccatagatggagtaagtagtctattaaaggaactaaagactcaaagtccggatgtattaatagtagtcagtagacatctgacaaacgatgccttttgtaaatatatcaataagcattatgatttgttcatcttggatgaatcacatacgtataatctgatgaacaatacagcagttacaagatttttagcgtattatcctccgatgatgtgttattttttaactgctacacctagaccatctaaccgaatttattgtaacagtattattaatattgccaagttatccaatctaaaaaaaactatctatgcagtagatagtttttttgagccatattccacagataatattagacatatggtaaaacgactagatggaccatctaataaatatcatatatataccgagaagttattatctgtagacgagcctagaaatcaacttattcttgataccctggtagaagaattcaagtcaggaactattaatcgcattttagttattactaaactacgtgaacatatggtattattctacaaacgattattagattttttcggaccagaggttgtatttataggagacgcccaaaatagacgtactccagatatggtcaaatcaatcaaggaactaaatagatttatattcgtatccaccttattttattccggtactggtttagatattcctagtttggattcgttgttcatttgctcggcagtaatcaacaatatgcaaatagagcaattactagggagggtatgtcgagaaacagaactattagataggacggtatatgtatttcctaacacatccatcaaagaaataaagtacatgataggaaatttcatgcaacgaattattagtctgtctgtagataaactaggatttaaacaaaaaagttatcggaaacatcaagaatccgatcccacttctgcatgtacaacatcatccagagaagaacgtgtattaaatagaatatttaactcgcaaaatcgttaagaagtttaagcgacgatccgcatgctgcgcaggccagtgtattacccctcatagtattaatataatccaatgatacttttgtgatgtcggaaatcttaaccaatttagactgacaggcagaacacgtcatgcaatcatcatcgtcatcgataactgtagtcttgggcttctttttgcgactcttcattccggaacgcacattggtgctatccatttaggtagtaaaaaataagtcagaatatgccctataacacgatcgtgcaaaacctggtatatcgtctctatctttatcacaatatagtgtatcgacatttttattattattgacctcgtttatcttggaacatggaatgggaacatttttgttatcaacggccatctttgccttaattccagatgttgtaaaattataactaaacagtctatcatcgacacaaatgaaattcttgtttagacgtttgtagtttacgtatgcggctcgttcgcgtctcattttttcagatattgcaggtactataatattaaaaataagaatgaaataacataggattaaaaataaagttatcatgacttctagcgctgatttaactaacttaaaagaattacttagtctgtacaaaagtttgagattttcagattctgcggctatagaaaagtataattctttggtagaatggggaacatctacttactggaaaataggcgtgcaaaaggtagctaatgtcgagacgtcaatatctgattattatgatgaggtaaaaaataaaccgtttaatattgatccgggctattacattttcttaccggtatattttgggagcgtctttatttattcgaagggtaaaaatatggtagaacttggatctggaaactcttttcaaataccagatgatatgcgaagtgcgtgtaacaaagtattagacagcgataacggaatagactttctgagatttgttttgttaaacaatagatggataatggaagatgctatatcaaaatatcagtctccagttaatatatttaaactagctagtgagtacggattaaacatacccaaatatttagaaattgaaatagaggaagacacattatttgacgacgagttatactctattatagaacgctctttcgatgataaatttccaaaaatatccatatcgtatattaagttgggagaacttagacggcaagttgtagactttttcaaattctcattcatgtatattgagtccatcaaggtagatcgtataggagataatatttttattcctagcgttataacaaaatcaggaaaaaagatattagtaaaagatgtagaccatttaatacgatccaaggttagagaacatacatttgtaaaagtaaaaaagaaaaacacattttccattttatacgactatgatggaaacggaacagaaactagaggagaagtaataaaacgaattatagacactataggacgagactattatgttaacggaaagtatttctctaaggttggtagtgcaggcttaaagcaattgactaataaattagatattaatgagtgcgcaactgtcgatgagttagttgatgagattaataaatccggaactgtaaaacgaaaaataaaaaaccaatcagcatttgatttaagcagagaatgtttgggatatccagaagcggattttataacgttagttaataacatgcggttcaaaatagaaaattgtaaggttgtaaatttcaatattgaaaatactaattgtttaaataacccgagtattgaaactatatatggaaactttaaccagttcgtctcaatctttaatgtcgtcaccgatgtcaaaaaaagattattcgagtgaaataatatgcgcctttgatataggtgcaaaaaatcctgccagaactgttttagaagtcaaggataactccgttagggtattggatatatcaaaattagactggagttctgattgggaaaggcgcatagctaaagatttgtcacaatatgaatacactacagttcttctagaacgtcagcctagaaggtcgccgtatgttaaatttatctattttattaaaggctttttatatcatacatcggctgccaaagttatttgcgtctcgcctgtcatgtctggtaattcatatagagatcgaaaaaagagatcggtcgaagcatttcttgattggatggacacattcggattgcgagactccgttccggatagacgcaaattagacgatgtagcggatagtttcaatttggctatgagatacgtattagataaatggaatactaattatacaccttataataggtgtaaatctagaaattacataaaaaaaatgtaataacgttagtaacgccattatggataatctatttacctttctacatgaaatagaagatagatatgccagaactatttttaactttcatctaataagttgcgatgaaataggagatatatatggtcttatgaaagaacgcatttcctcagaggatatgtttgataatatagtgtataataaagatatacatcctgccattaagaaactagtgtattgcgacatccaacttactaaacacattattaatcagaatacgtatccggtatttaacgattcttcacaagtgaaatgttgtcattatttcgacataaactcagataatagcaatattagctctcgtacagtagagatatttgagagggaaaagtcatctcttgtatcatatattaaaactaccaataagaagagaaaggtcaattacggcgaaataaagaaaactgttcatggaggcactaatgcaaattacttttccggtaaaaagtctgacgagtatctgagtactacagttagatccaacattaatcaaccttggatcaaaaccatctctaagaggatgagagttgatatcattaatcactctatagtaacgcgtggaaaaagctctatattacaaactatagaaattatttttactaatagaacatgtgtgaaaatattcaaggattctactatgcacattattctatccaaggacaaggatgaaaaggggtgtatacacatgattgacaaattattctatgtctattataatttatttctgttgttcgaagatatcatccaaaacgagtactttaaagaagtagctaatgttgtaaaccacgtactcacggctacggcattagatgagaaattattcctaattaagaaaatggctgaacacgatgtttatggagttagcaatttcaaaatagggatgtttaacctgacatttattaagtcgttggatcataccgttttcccctctctgttagatgaggatagcaaaataaagttttttaaggggaaaaagctcaatattgtagcattacgatctctggaggattgtataaattacgtgactaaatccgagaatatgatagaaatgatgaaggaaagatcgactattttaaatagcatagatatagaaacggaatcggtagatcgtctaaaagaattgcttctaaaatgaaaaaaaacactaattcagaaatggatcaacgactagggtataagtttttggtgcctgatcctaaagccggagttttttatagaccgttacatttccaatatgtatcgtattctaattttatattgcatcgattgcatgaaatcttgaccgtcaagcggccactcttatcgtttaagaataatacagaacgaattatgatagaaattagcaatgttaaagtgactcctccagattactcacctataatcgcgagtattaaaggtaagagttatgacgcattagccacgttcactgtaaatatctttaaagaggtaatgaccaaagagggtatatccatcactaaaataagtagttatgagggaaaagattctcatttgataaaaattccgctactaataggatacgggaataaaaatccacttgatacagccaagtatcttgttcctaatgtcataggtggagtctttatcaataaacaatctgtcgaaaaagtaggaattaatctagtagaaaagattacaacatggccaaaatttagggttgttaagccaaactcattcactttctcgttttcctccgtatcccctcctaatgtattaccgacaagatatcgccattacaagatatctctggatatatcacaattggaagcgttgaatatatcatcgacaaagacatttataacggtcaatattgttttgctgtctcaatatttatctagagtgagtctagaattcattagacgtagtttatcatacgatatgcctccagaagttgtctatctagtaaacgcgataatagatagtgctaaacgaattactgaatctattactgactttaatattgatacatacattaatgacctggtggaagctgaacacattaaacaaaaatctcagttaacgatcaacgagttcaaatatgaaatgctgcataactttttacctcatatgaactatacacccgatcaactaaagggattttatatgatatctttactaagaaagtttctctactgtatcttccacacttctagatatccagatagagattcgatggtttgtcatcgcatcctaacgtacggcaaatattttgagacgttggcacatgatgaattagagaattacataggcaacatccgaaacgatatcatgaacaatcacaagaacagaggcacttacgcggtaaacattcatgtactaacaactcccggacttaatcacgcgttttctagcttattgagtggaaagttcaaaaagtcagacggtagttatcgaacacatcctcactattcatggatgcagaatatttctattcctaggagtgttggattttatccggatcaagtaaagatttcaaagatgttttctgtcagaaaataccatccaagtcaatatctttacttttgttcatcagacgttccggaaagaggtcctcaggtaggtttagtatctcaattgtctgtcttgagttccattacaaatatactaacgtctgagtatttggatttggaaaagaaaatttgtgagtatatcagatcatattataaagatgatataagttactttgaaacaggatttccaatcactatagaaaatgctctagtcgcatctcttaatccaaatatgatatgtgattttgtaactgactttagacgtagaaaacggatgggattcttcggtaacttggaggtaggtattactttagttagggatcacatgaatgaaattcgcattaatattggagcgggaagattagtcagaccattcttggttgtggataacggagagctcatgatggatgtgtgtccggagttagaaagcagattagacgacatgacattctctgacattcagaaagagtttccgcatgtcatcgaaatggtagatatagaacaatttacttttagtaacgtatgtgaatcggttcaaaaatttagaatgatgtcaaaggatgaaagaaagcaatacgatttatgtgactttcctgccgaatttagagatggatatgtagcatcttcattagtgggaatcaatcacaattctggacccagagctattcttggatgtgctcaagctaaacaagctatctcttgtctgagctcggatatacgaaataaaatagacaatggaattcatttgatgtatccagagaggccaatcgtgattagtaaggctttagaaacttcaaagattgcggctaattgcttcggccaacatgttactatagcattaatgtcgtacaaaggtatcaatcaagaggatggaattatcatcaaaaaacaatttattcagagaggcggtctcgatattgttacagccaagaaacatcaagtagaaattccattggaaaactttaataacaaagaaagagataggtctaacgcctattcaaaattagaaagtaatggattagttagactgaatgctttcttggaatccggagacgctatggcacgaaatatctcatcaagaactcttgaagatgattttgctagagataatcagattagcttcgatgtttccgagaaatataccgatatgtacaaatctcgcgttgaacgagtacaagtagaacttactgacaaagttaaggtacgagtattaaccatgaaagaaagaagacccattctaggagacaaatttaccactagaacgagtcaaaagggaacagtcgcgtatgtcgcggatgaaacggaacttccatacgacgaaaatggtatcacaccagatgtcattattaattctacatccatcttctctagaaaaactatatctatgttgatagaagttattttaacagccgcatattctgctaagccgtacaacaataagggagaaaaccgacctgtctgttttcctagtagtaacgaaacatccatcgatacatatatgcaattcgctaaacaatgttatgagcattcaaatccgaaattgtccgatgaagaattatcggataaaatcttttgtgaaaagattctctatgatcctgaaacggataagccttatgcatccaaagtattttttggaccaatttattacttgcgtctgaggcatttaactcaggacaaggcaaccgttagatgtagaggtaaaaagacgaagctcattagacaggcgaatgagggacgaaaacgtggaggaggtatcaagttcggagaaatggagagagactgtttaatagcgcatggtgcagccaatactattacagaagttttgaaagattcggaagaagattatcaagatgtgtatgtttgtgaaaattgtggagacatagcagcacaaatcaagggtattaatacatgtcttagatgttcaaaacttaatctctctcctctcttaacaaaaattgataccacgcacgtatctaaagtatttcttactcaaatgaacgccagaggcgtaaaagtcaaattagatttcgaacgaaggcctccttcgttttataaaccattagataaagttgatctcaagccgtcttttctggtgtaatattctagtttggtagtagatacatatcaatatcatcaaattcgagatccgaattataaaatgggcgtggattgttaactatagaatcggacgtctgatattcgaaaatctgtggagtttcaggttttggtggaggtgtaactgctacttgggatactgaagtctgatattcagaaagctgtggatgttctggttcggcatccaccgatggtgtcacatcactaatcggttcggtaacgtctgtggatggaggtgctacttctacagaacctgtagcctcagttgtcaacggagatacatttttaatgcgagaaaatgtataatttggtaatggtttcttatgtggatctgaagaagaggtaagatatctactagaaagataccgatcacgttctagttctcttttgtagaacttaactttttctttctccgcatctagttgatattccaacctcttcacgttactacgttcagattccaattcacgttcgcatgggttacctccgcagtttttacgagcgatttcacgttcagccttcatgcgtctctccctctctctatcgagtttatcagagcagtctttctgaaggcgatcgaactccataaatttctccaacgctttgattgtttccatagatttccgaagttcagcttttaggactgtgattctttttctttcgaattcacagctggatgtacaaccgtttccattaccgccatctctaagtttcttttctagatcggcaacatttcatccccatgccttttacattcctcgagtctactgtcgtcgaaatatcgttccagctccttttcgacatcaataactttagcacgttgtctctcaagctctcttttgtagttatctgattccctggcacgtttaagatcttcatgcaattgagtcagctcttaacttcctctcttgcttcttcgtcatagtacgcgcaatcactgtgagatccattgttaccacgtctacactcggcgagctcgcgtttaagagattcaatttcccgtttgtattggtccatgtttccattgctaccaccattagatttacaggctgctagttgtcgttcgagatcagaaatacgggttttcttggaattgatttcgtcgatgtacttggcatcgaaacacttattaagttctttttccaattctacgattttatttctttcgcgagtcaattccctcctgtagtaactatctgttttgtcagattcacgctctctacgtagactttcttgcaagttactaatttgttccctagcacgtccgagtttagttttatatgctgaatagagttctgattcatcctttgagcagatctctagcgatcgtttaagattcctaattctagtctttagcctatttacctcctcagaagatgttccgttaccgttgcgtttacactcgttaagctgtctatcaagatccatgattctatctctaagacgttgcatctctctttccatatcagcattgctttcattattacgtctgcagtcactcaactgtctttcaatatctgagattctatctctaagacgtcgcatctctctctgtttcggcattggtttcattattacgtttacagtcgttcaactgtctttcaagatctgatattctagattggagtctgctaatctctgtagcattttcacggcattcactcagttgtctttcaagatctgaaattttagattggagtctgctaatctctgtaagatttcctcctccgctctcgatgcagtcggtcaacttattctctagttctctaatacgcgaacgcagtgcatcaacttcttgcgtgtcttcctggttgcgtgtacattcatcgagatctctaacgcgtcgtcgttcttcctcaagttctctgcgtactacagaaagcgtgtccctatcttgttgatatttagcaatttctgattctagagtactgattttgcttacgtagttactaatagttgtcttggccttatcaagatcctccttgtatttgtcgcattccttgatatccctacgaagtctggacagttcccattcgacattacgacgtttatcgatttcagctcggagatcgtcatcgcgttgttttagccacatacgactgagttcaagttctcgttgacaagatccatctacttttccattcctaatagtatccagttccttttctagttctgaacgcatttctcgttccctatcaagcgattctctcaattctcggatagtcttcttatcaatttctaataaatctgaaccatcatctgtcccattttgaatatccctgtgttctttgatctcttttgtaagtcggtcgattctttcggttttataaacagaatccctttccaaagtcctaatcttactgagtttatcactaagttctgcattcaattcggtgagttttctcttggcttcttccaactctgttttaaactctccactatttccgcattcttcctcgcatttatctaaccattcaattagtttattaataactagttggtaatcagcgattcctatagccgttcttgtaattgtgggaacataattaggatcttctaatggattgtatggcttgatagcatcatctttatcattattagggggatggacaaccttaattggttggtcctcatctcctccagtagcgtgtggttcttcaataccagtgttagtaataggcttaggcaaatgcttgtcgtacgcgggcacttcctcatccatcaagtatttataatcgggttctacttcagaatattcttttctaagagacgcgacttcgggagttagtagaagaactctgtttctgtatctatcaacgctggaatcaatactcaagttaaggatagcgaatacctcatcgtcatcatccgtatcttctgaaacaccatcatatgacatttcatgaagtctaacgtattgataaatagaatcagatttagtattaaacagatccttaacctttttagtaaacgcatatgtatattttagatctccagatttcataatatgatcacatgccttaaatgtcagtgcttccatgatataatctggaacactaatgggtgacgaaaaagatacagcaccatatgctacgttgataaataaatctgaaccactaagtagataatgattaatgttaagaaagaggaaatattcagtgtataggtatgtcttggcgtcatatcttgtactaaacacgctaaacagtttgttaatgtgatcaatttccaatagattaattagagcagcgggaataccaacaaacatattaccacatccgtattttctatgaatatcacatatcatgttaaaaaatcttgatagaagagcgaatatctcgtctgacttaatgagtcgtagttcagcagcaacataagtcataactgtaaatagaacatactttcctgtagtgttgattctagactccacatcaacaccattattaaaaatagttttatatacatctttaatctgctctccgttaatcgtcgaacgttctagtatacggaaacactttgatttcttatctgtagttaatgacttagtgatatcacgaagaatattacgaattacatttcttgtttttcttgagagacctgattcagaactcaactcatcgttccatagtttttctacctcagtggcgaaatctttggagtgcttggtacatttttcaataaggttcgtgacctccatttattataaaaaatttattcaaaacttaactacaatcgggtaattataagatcgtagatctcccatgtggcggaatactaccatctatcgcatgtggatggacagtaggtaatggccatgggaacagtaatgtttgcatatttatctttcttgctagtattactgcatattgtcccaatgtttcgatgtgatgttctaacctatcaactgccgctgtatcacaacaatagtgtccgatgaaattaagattatgatccaatgtgtttaatatatgattatcaagtcttatacgatccgcgtcttttttgacaggatcaggttcttctacaggaagaagtttcggcctcttatgatattcatgtctgggaaacggtggtctagggtgaggctccggtatcggagtgggttttggattataatcatcatcgtctatgacatcatcttcgacttcgatatttattttgctatcttgatgatgtcctgtatcagttgcattttcagcactcgactgaatattagcgcattcattgtctattattaccatatttctaaacccaaaatgtatgtgttgaacatcagtactatcgttgatgagtcttatagcatgaattcgcttatcgttatcgggtttatcttctgtcaccttagcaattccttttttattaaactctacataatcatatccatttctattgtttgttctaatataaacgagtatagcatcattgctaaatttttcaatagtatcaaaaacagaatatcctaaaccatataatatatattcaggaacactcaaactaaatgtccaggattctcctaaatacgtaaactttaatagtgcgaaatcattcaaaaatctaccacttatagatagatagtacataaatgcgtatagtagtctacctatctctttattatgaaaaccggcattacgatcatatatgtcgtgatatacctgtgatccgtttacgttaaaccataaatacatgggtgatcctataaacatgaatttatttctaattctcagagctatagttaattgaccgtgtaatatttgcttacatgcatacttgatacgcttattaataagatttttatcattgctcgttatttcagaatcgtatatataaggagtaccatcgtgattcttaccagatattatacaaaatactatatataaaatatattgacccacgttagtaatcatataaatgtttaacgttttaaattttgtattcaatgatccattatcatacgctatcatggtcttgtaatattcattctttaaaatataatattgtgttagccattgcattggagctcctaatggagattttctattctcatccattttaggataggctttcataaagtccctaataacttcgtgaataatgtttctatgttttctactgatgcatgtatttgcttcgatttttttatcccatgtttcatctatcatagatttaaacgcagtaatgctcgcaacattaacatcttgaaccgttggtacaattccgttccataaatttataatgttcgccatttatataactcattttttgaatatacttttaattaacaaaagagttaagttactcatatggacgccgtccagtctgaacatcaatctttttagccagagatatcatagccgctcttagagtttcagcgtgattttccaacctaaatagaacttcatcgttgcgtttacaacacttttctatttgttcaaactttgttgttacattagtaatctttttttccaaattagttagccgttgtttgagagtttcctcattgtcgtcttcatcggctttaacaattgcttcgcgtttagcctctggctttttagcagcctttgtagaaaaaaattcagttgctggaattgcaagatcgtcatctccggggaaaagagttccgtccatttaaagtacagattttagaaactgacactctgcgttatttatatttggtacaacacatggattataaatattgatgttaataacatcagaaaatgtaaagtctatacattgttgcatcgtgttaaattttctaatggatctagtattattgggtccaacttctgcctgaaatccaaatatggaagcggatacaaaaccgtttcctggataaaccacacatctccacttttgctttacatcagaaattgtgtcgttgacatcttgaactctcctatctaatgccggtgttccacctatagattttgaatattcgaatgctgcatgagtagcattaaattccttaatattgccataattttcatatattgagtaaccctggataaaaagtaaacacaccgcagccgtcgctaccacaataaaaaaaattgatagagagttcatttataatctattagaagctgacaaaatttttttacacgcatcagacaatgctttaataaatagttcaacatctacttttgtcatatcgaaccgatggtatgattctaacctagaattacatccgaaaaagttgactatgttcatagtcattaagtcattaacaaacaacattccagactctggattataagacgatactgtttcgtcacaattacctaccttaatcatgtgattatgaatattggctattagagcaccttctaagaaatctataatatctttgaaacacgatttaaaatcaaaccacgaatatacttctacgaagaaagttagtttacccataggagaaataactataaatggagatctaaatacaaaatccggatctatgatagttttaacattattatattctctattaaatacctccacatctaaaaatgttaattttgaaactatgtcttcgtttattaccgtacctgaactaaacgctataagctctattgtttgagaactctttaaacgatattcttgaaatacatgtaacaaagtttcctttaactcggtcggtttatctaccatagttacagaatttgtatccttatctataatataataatcaaaatcgtataaagttatataattatcgcgttcagattgtgatcttttcaaatagactaaaaaccccatttctctagtaagtatcttatgtatatgtttgtaaaatatcttcatggtgggaatatgctctaccgcagttagccattcctcattgacagcggtagatgtattagacaaaactattccaatgtttaacaagggccattttacgagattattaaatccttgtttgataaatgtagccaatgagggttcgagttcaacgacgattgaattctcttcccgcggatgctgcatgatgaacgacgggatgttgttcgattgatttggaattctttttcgactttttgtttatattaaatattttaaaatttatagcggatagcaattcatgtaccacggataatgtagacgcgtattgcgcatcgatatctttattattagataaatttatcaataaatgtgagaagtttgcctcgttaaggtcttccatttaaatattatataaacatttgtgtttgtatcttattcgtcttttatggaatagttttttactagtaaagctgcaattacacactttgtccgtaaaacataaatataaacaccagcttttatcaatcgttccaaaaagtcgacggcggacatttttaacatggcatctattttaaatacacttaggtttttggaaaaaacatcattttataattgtaacgattcaataactaaagaaaagattaagattaaacataagggaatgtcatttgtattttataagccaaagcattctaccgttgttaaatacttgtctggaggaggtatatatcatgatgatttggttgtattggggaaggtaacaattaataatctaaagatgatgctattttacatggatttatcatatcatggagtgacaagtagtggagcaatttacaaattgggatcgtctatcgatagactttctctaaataggactattgttacaaaagttaataattatgatgatacattttttgacgacgatgattgatcgctattgcacaattttgtttttgtactttctaatatagtgtttaggttctttttcatatgagaatattgatttactaaaatatctatgtttaacttttgttctatgacgtccttatcggcggtatcggtacatatacgtaattcaccttcacaaaatacggagtcttcgataataatagccaatcgattattggatctagctgtctgtatcatattcaacatgtttaatatatcctttcgtttcccctttacaggcatcgatcgtagcatattttccgcgtctgatatggaaatgttaaaactacaaaaatgcgtaatgttagcccgtcctaatattggtacgtgtctataagtttggcatagtagaataatagacgtgtttaaatgccttccaaagtttaagaattctattagagtattgcattttgatagtttatcgcctacatcatcaaaaataagtaaaaagtgtgctgattttttatgattttgtgcgacagcaatacatttttctatgttacttttagttcgtatcagattatattctagagattcctgactactaacgaaattaatatgatttggccaaatgtatccatcataatctgggttataaacgggtgtaaacaagaatatatgtttatattttttaactagtgtagaaaacagagatagtaaatagatagtttttccagatccagatcctcctgttaaaaccattctaaacggcatttttaataaattttctcttgaaaattgtttttcttggaaacaattcataattatatttacagttactaaattaatttgataataaatcaaaatatggaaaactaaggttgttagtagggaggagaacaaagaaggcacatcgtgatataaataacatttattatcatgatgacaccagaaaacgacgaagagcagacatctgtgttctccgctactgtttacggagacaaaattcagggaaagaataaacgcaaacgcgtgattggtctatgtattagaatatctatggttatttcactactatctatgattaccatgtccgcgtttctcatagtgcgcctaaatcaatgcatgtctgctaacgaggctgctattactgacgccgctgttgccgttgctgctgcatcatctactcatagaaaggttgcgtctagcactacacaatatgatcacaaagaaagctgtaatggtttatattaccagggttcttgttatatattacattcagactaccagttattctcggatgctaaagcaaattgcactgcggaatcatcaacactacccaataaatccgatgtcttgactacctggctcattgattatgttgaggatacatggggatctgatggtaatccaattacaaaaactacatccgattatcaagattctgatgtatcacaagaagttagaaagtatttttgtgttaaaacaatgaactaatatttatttttgtacattaataaatgaaatcgcttaatagacaaactgtaagtaggtttaagaagttgtcggtgccggccgctataatgatgatactctcaaccattattagtggcataggaacatttctgcattacaaagaagaactgatgcctagtgcttgcgccaatggatggatacaatacgataaacattgttatttagatactaacattaaaatgtctacagataatgcggtttatcagtgtcgtaaattacgagctagattgcctagacctgatactagacatctgagagtattgtttagtattttttataaagattattgggtaagtttaaaaaagaccaatgataaatggttagatattaataatgataaagatatagatattagtaaattaacaaattttaaacaactaaacagtacgacggatgctgaagcgtgttatatatacaagtctggaaaactggttaaaacagtatgtaaaagtactcaatctgtactatgtgttaaaaaattctacaagtgacaacaaaaaatgaattaataataagtcgttaacgtacgccgccatggacgccgcgtttgttattactccaatgggtgtgttgactataacagatacattgtatgatgatctcgatatctcaatcatggactttataggaccatacattataggtaacataaaaactgtccaaatagatgtacgggatataaaatattccgacatgcaaaaatgctactttagctataagggtaaaatagttcctcaggattctaatgatttggctagattcaacatttatagcatttgtgccgcatacagatcaaaaaataccatcatcatagcatgcgactatgatatcatgttagatatagaagataaacatcagccattttatctattcccatctattgatgtttttaacgctacaatcatagaagcgtataacctgtatacagctggagattatcatctaatcatcaatccttcagataatctgaaaatgaaattgtcgtttaattcttcattctgcatatcagacggcaatggatggatcataattgatgggaaatgcaatagtaattttttatcataaaagttgtaaagtaaataataaaacaataaatattgaactagtagtacgtatattgagcaatcagaaatgatgctggtacctcttatcacggtgaccgtagttgcgggaacaatattagtatgttatatattatatatttgtaggaaaaagatacgtactgtctataatgacaataaaattatcatgacaaaattaaaaaagataaagagttctaattccagcaaatctagtaaatcaactgatagcgaatcagactgggaggatcactgtagtgctatggaacaaaacaatgacgtagataatatttctaggaatgagatattggacgatgatagcttcgctggtagtttaatatgggataacgaatccaatgttatggcgcctagcacagaacacatttacgatagtgttgctggaagcacgctgctaataaataatgatcgtaatgaacagactatttatcagaacactacagtagtaattaatgaaacggagactgttgaagtacttaatgaagataccaaacagaatcctaactattcatccaatcctttcgtaaattataataaaaccagtatttgtagcaagtcaaatccgtttattacagaacttaacaataaatttagtgagaataatccgtttagacgagcacatagcgatgattatcttaataagcaagaacaagatcatgaacacgatgatatagaatcatcggtcgtatcattggtgtgattagtttcctttttataaaattgaagtaatatttagtattattgctgccgtcacgttgtacaaatggagatattccctgtattcggcatttctaaaattagcaattttattgctaataatgactgtagatattatatagatacagaacatcaaaaaattatatctgatgagatcaatagacagatggatgaaacggtacttcttaccaacatcttaagcgtagaagttgtaaatgacaatgagatgtaccatcttattcctcatagattatcgacgattatactctgtattagttctgtcggaggatgtgttatctctatagataatgacatcaatggcaaaaatattctaacctttcccattgatcatgctgtaatcatatccccactgagtaaatgtgtcgtagttagcaagggtcctacaaccatattggttgttaaagcggatatacctagcaaacgattggtaacatcgtttacaaacgacatactatatgtaaacaatctgtcactgattaattatttgccgttgtctgtattcattattagacgagtcaccgactatttggatagacacatatgcgatcagatatttgctaataataagtggtattcccttataaccatcgacgataagcaatatcctattccatcaaactgtataggtatgtcctctgccaagtacataaattctagcatcgagcaagatactttaatccatgtttgtaacctcgagcatccgttcgactcagtatacaaaaaaatgcagtcgtacaattctctacctatcaaggaacaaatattgtacggtagaattgataatataaatatgagcattagtatttctgtggattaatagatttctagtatggggatcattaatcatctctaatctctaaatacctcataaaacgaaaaaaaagctattatcaaatactgtacggaatggattcattctcttctctttttatgaaactctgttgtatatctactgataaaactggaagcaaaaaatctgatagaaagaataagaataagatcaaggattatatggaacacgattattataaaataacaatagttcctggttcctcttccacgtctactagctcgtggtattatacacatgcctagtaatagtctctttgcgttgacggaaagcagactagaaataacaggctaaaatgttcagacaccataatagttcccaacccagataataacagagttccatcaacacattcctttaaactcaatcccaaacccaaaaccgttaaaatgtatccggccaattgatagtagataatgaggtgtacagcgcatgataatttacacagtaaccaaaatgaaaatactttagtaattataagaaatatagacggtaatgtcatcatcaacaatccgataatatgcctgagagtaaacattgacggataaaacaaaaatgctccgcataactctatcatggcaataacacaaccaaatacttgtaagattcctaaattagtagaaaatacaacgaatatcgatgtataagtgatctcgagaaataataagaataaagtaatgcccgtaaagataaacatcaacattgtttggtaatcattaaaccaattagtatgaagttgaactaatttcacagtagattttattccagtgttatcctcgcatgtataagtacctggtaagatatctttatattccataatcaatgagacatcactatctgataacgaatgaagtctagcactagtatgccatttacttaatattgtcgtcttggaagttttattataagttaaaatatcatggttatccaatttccatctaatatactttgtcggattatctatagtacacggaataatgatggtatcattacatgctgtatactctatggtctttgtagttgttataacaaccaacgtatagaggtatatcaacgatattctaactcttgacattttttatttatttaaaatgatacctttgttatttattttattctattttgctaacggtattgaatggcataagtttgaaacgagtgaagaaataatttctacttacttattagacgacgtattatacacgggtgttaatggggcggtatacacattttcaaataataaactaaacaaaactggtttaactaataataattatataacaacatctataaaagtagaggatgcggataaggatacattagtatgcggaaccaataacggaaatcccaaatgttggaaaatagacggttcagacgacccaaaacatagaggtagaggatacgctccttatcaaaatagcaaagtaacgataatcagtcacaacggatgtgtactatctgacataaacatatcaaaagaaggaattaaacgatggagaagatttgacggaccatgtggttatgatttattcacggcggataacgtaattccaaaagatggtttacgaggagcattcgtcgataaagacggtacttatgacaaagtttacattcttttcactgatactatcggctcaaagagaattgtcaaaattccgtatatagcacaaatgtgcctaaacgacgaaggtggtccatcatcattgtctagtcatagatggtcgacgtttctcaaagtcgaattagaatgtgatatcgacggaagaagttatagacaaattattcattctagaactataaaaacagataatgatacgatactatatgtattcttcgatagtccttattccaagtccgcattatgtacctattctatgaataccattaaacaatctttttctacgtcaaaattggaaggatatacaaagcaattgccgtctccagctcctggtatatgtttaccagctggaaaagttgttccacataccacgtttgaagtcatagaacaatataatgtactagatgatattataaagcctttatctaaccaacctatcttcgaaggaccgtctggtgttaaatggttcgatataaaggagaaggaaaatgaacatcgggaatatagaatatacttcataaaagaaaattctatatattcgttcgatacaaaatctaaacaaactcgtagctcgcaagtcgatgcgcgactattttcagtaatggtaactgcgaaaccgttatttatagcagatatagggataggagtaggaatgccacaaatgaaaaaaatacttaaaatgtaatcttaatcgagtacaccacacgacaatgaacaaacataagacagattatgctggttatgcttgctgcgtaatatgcggtctaattgtcggaattatttttacagcgacactattaaaagttgtagaacgtaaattagttcatacaccattaatagataaaacgataaaagatgcatatattagagaagattgtcctactgactggataagctataataataaatgtatccatttatctactgatcgaaaaacctgggaggaaggacgtaatgcatgcaaagctctaaattcaaattcggatctaattaagatagagactccaaacgagttaagttttttaagaagccttagacgaggctattgggtaggagaatccgaaatattaaaccagacaaccccatataattttatagctaagaatgccacgaagaatggaactaaaaaacggaaatatatttgtagcacaacgaatactcccaaactgcattcgtgttacactatataacaattacactacatttttatcataccactacttcggttagatgttttagaaaaaaataaatatcgccgtaccgttcttgtttttataaaaataacaattaacaattatcaaattttttctttaatattttacgtggttgaccattcttggtggtaaaataatctcttagtgttggaatggaatgctgtttaatgtttccacactcatcgtatattttgacgtatgtagtcacatcgtttacgcaatagtcagactgtagttctatcatgcttcctacatcagaaggaggaacagttttaaagtctcttggttttaatctattaccgttagttttcatgaaatcctttgttttatccacttcacattttaaataaatgtccactatacattcttttgttaattttactagatcgtcatgggtcatagaatttataggttccgtagtccatggatccaaactagcaaacttcgcgtatacggtatcgcgattagtgtatacaccaactgtatgaaaattaagaaaacagtttaataaatcaacagaaatatttaatcctccgtttgatacagatgcgccatatttatggatttcggattcacacgttgtttgtctgaggtgttcgtctagtgttgcttctacgtaaacttcgattcccatatattctttattgtcagaatcgcataccgatttatcatcatacactgtttgaaaactaaatggtatacacatcaaaataataaataataacgagtacattctgcaatattgttatcgtaattggaaaaatagtgttcgagtgagttggattatgtgagtattggattgtatattttattttatattttgtaataagaataaaatgctaatgtcaagtttattccaatagatgtcttattaaaaacatatataataaataacaatggctgaatggcataaaattatcgaggatatctcaaaaaataataagttcgaggatgccgccatcgttgattacaagactacaaagaatgttctagctgctattcctaacagaacatttgccaagattaatccgggtgaaattattcctctcatcactaatcgtaatattctaaaacctcttattggtcagaaatattgtattgtatatactaactctctaatggatgagaacacgtatgctatggagttgcttactgggtacgcccctgtatctccgatcgttatagcgagaactcataccgcacttatatttttgatgggtaagccaacaacatccagacgtgacgtgtatagaacgtgtagagatcacgctacccgtgtacgtgcaactggtaattaaaataaaaagtaatattcatatgtagtgtcaattttaaatgatgatgatgaaatggataatatccatattgacgatgtcaataatgccggtattggcatacagttcatcgatttttagatttcattcagaggatgtggaattatgttatgggcatttgtattttgataggatctataatgtagtaaatataaaatataatccgcatattccatatagatataattttattaatcgcacgttaaccgtagatgaactagacgataatgtcttttttacacatggttattttttaaaacacaaatatggttcacttaatcctagtttgattgtctcattatcaggaaacttaaaatataatgatatacaatgctcagtaaatgtatcgtgtctcattaaaaatttggcaacgagtacatctactatattaacatctaaacataagacttattctctacatcggtccacgtgtattactataataggatacgattctattatatggtataaagatataaatgacaagtataatgacatctatgattttactgcaatatgtatgctaatagcgtctacattgatagtgaccatatacgtgtttaaaaaaataaaaatgaactcttaattatgctatgctattagaaatggataaaatcaaaattacggttgattcaaaaattggtaatgttgttaccatatcgtataacttggaaaagataactattgatgtcacacctaaaaagaaaaaagaaaaggatgtattattagcgcaatcagttgctgtcgaagaggcaaaagatgtcaaggtagaagaaaaaaatattatcgatattgaagatgacgatgatatggatgtagaaagcgcgtaatacgatctataaaaataagtatataaatactttttatttactgtactcttactgtgtagtggtgataccctactcgattatttttttaaaaaaaaaatacttattctgattcttctagccatttccgtgttcgtttgaatgccacatcgacgtcaaagataggggagtagttgaaatctagttctgcattgttggtacgcacctcaaatgtagtgttggatatcttcaacgtatagttgttgagtagtgatggttttctaaatagaattctcttcatatcattcttgcacgcgtacatttttagcatccatcttggaatcctagatccttgttctattcccaatggtttcatcaatagaagattaaacatatcgtacgaacacgatggagagtaatcgtagcaaaagtaagcatttcctttaatcttagatcccggatactggatatattttgcagccaacacgtgcatccatgcagcatttcctacatatacccggctatgcaccgcgtcatcatcgactgtacgatacataatgttaccgtgttgcttacattgctcgtaaaagactttcatcaatttgtctccttctccgtaaattccagtgggtcttaggcaacaagtatacaattttgctccattcatgattacggaattattggctttcataaccagttgctcggccatacgtttactttttgcgtatacatgtcctggtgatatatcataaagggtatgctcatggccgatgaatggatcaccgtgtttattgggtcctattgcttccatgctactagtatagatcaaatacttgattcctaggtccacacaagctgccaaaatagtctgtgttccataatagtttactttcatgatttcattatcggtgtattttccaaatacatccactagagcagccgtatgaataatcagatttaccccatctagcgcttctctcaccttatcaaagtcgtttatatcacattgtatatagtttataaccttaactttcgaggttattggttgtggatcttctacaatatctatgactctgatttcttgaacatcatctgcactaattaacagttttactatatacctgcctagaaatccggcaccaccagtaaccgcgtacacggccattgctgccactcataatatcagactacttattctattttactaaataatggctgtttgtataatagaccacgataatatcagaggagttatttactttgaaccagtccatggaaaagataaagttttaggatcagttattggattaaaatccggaacgtatagtttgataattcatcgttacggagatattagtcaaggatgtgattccataggcagtccagaaatatttatcggtaacatctttgtaaacagatatggtgtagcatatgtttatttagatacagatgtaaatatatttacaattattggaaaggcgttatctatttcaaaaaatgatcagagattagcgtgtggagttattggtatttcttacataaatgaaaagataatacattttcttacaattaacgagaatggcgtttgatatatcagttaatgcgtctaaaacaataaatgcattagtttacttttctactcagcaaaataaattagtcatacgtaatgaagttaatgatacacactacactgtcgaatttgatagggacaaagtagttgacacgtttatttcatataatagacataatgacaccatagagataagaggggtgcttccagaggaaactaatattggttgcgcggttagtatgacttacttgtataataagtatagttttaaactgattttagcagaatatataagacacagaaatactatatccggcaatatttattcggcattgatgacactagatgatttggctattaaacagtatggagacattgatctattatttaatgagaaacttaaagtagactccgattcgggactatttgactttgtcaactttgtaaaggatatgatatgttgtgattctagaatagtagtagctctatctagtctagtatctaaacattgggaattgacaaataaaaaatataggtgtatggcattagccgaacatatatctgatagtattccaatatctgagctatctagactacgatacaatctatgtaagtatctacgcggacacactgagagcatagaggataaatttgattattttgaagacgatgattcgtctacatgttctgccgtaaccgacagggaaacggatgtataattttttttatagcgtgaaggatatgataaaaaatataattgttgtatttatcccattccaatcaccttatatgattctgtaacacaataaaggagtcttatagatgtatagaggtcagatactggtttgataaactgtttattccacataagtatgtttgactttatggttagacccgcatactttaacaaatcactgaaaattggagttaggtattgacctctcagaatcagttgccgttctggaacattaaatgtattttttatgatatactccaacgcatttatgtgggcatacaacaagtcattactaatggaatattccaagagttttagttgtctagtatttaacaagagaagagatttcaacagactgtttatgaactcgaatgccgcctcattgtcgcttatattgatgatgtcgaattctcccaatatcatcaccgatgagtagctcatcttgttatcgggatccaagttttctaaagatgtcattaaaccctcgatcatgaatggatttatcatcatcgtttttatgttggacatgagcttagtccgtttgtccacatctatagaagatgatttctgaattatttcatatatctctctctttaactccaggaacttgtcaggatggtctactttaatatgttctcgtctaagagatgaaaatctttggatggttgcacgcgacttttctctaaaggatgacgttgcccaagatcctctcttaaatgaatccatcttatccttggacaagatggacagtctattttccttagatggtttaatatttttgttacccatgatctataaaggtagacctaatcgtctcggatgaccatatatttattttcagttttattatacgcataaattgtaaaaaatatgttaggtttacgaaaatgtctcgtggggcattaatcgtttttgaaggattggacaaatctggaaaaacaacacaatgtatgaacatcatggaatcaataccttcaaacacaataaaataccttaactttcctcagagatccactgtcactggaaagatgatagatgactatctaactcgtaaaaaaacctataatgatcatatagttaatctattattttgtgcaaatagatgggagtttgcatcttttatacaagaacaactagaacagggaattactttaatagttgatagatacgcattttctggagtagcgtatgccgccgctaaaggcgcgtcaatgactctcagtaagagttatgaatctggattgcctaaacccgacttagttatattcttggaatctggtagcaaagaaattaatagaaacgtcggtgaggaaatttatgaagatgttacattccaacaaaaggtattacaagaatataaaaaaatgattgaagaaggagatattcattggcaaattatttcttctgaattcgaggaagatgtaaagaaggagttgattaagaatatagttatagaggctatacacacggttactggaccagtggggcaactgtggatgtaatagtgaaattacattttttataaatagatgttagtacagtgttataaatggatgaagcatattactctggcaacttggaatcagtactcggatacgtgtccgatatgcataccgaactcgcatcaatatctcaattagttattgccaagatagaaactatagataatgatatattaaacaaggacattgtaaattttatcatgtgtagatcaaacttggataatccatttatctctttcctagatactgtatatactattatagatcaagagaactatcagactgagttgattaattcattagacgacaatgaaattatcgattgtatagttaataagtttatgagcttttataaggataacctagaaaatatagtagatgctatcattactctaaaatatataatgaataatccagattttaaaactacgtatgccgaagtactcggttccagaatagccgatatagatattaaacaagtgatacgtaagaatatactacaattgtctaataatatccgcgaacgatatttgtgaaaatattaaaaaaaaatactttttttattaaatgacgtcttttcgtgaatttagaaaattatgctgtgctatatatcacgcatcaggatataaagaaaaatctaaattaattagagactttataacagatagggatgataaatatttgatcattaagctattgcttcccggattagacgatagaatttataacatgaacgataaacaaattataaaattatatagtataatatttaaacaatctcaggaagatatgctacaagatttaggatacggatatataggagacactattaggactttcttcaaagagaacacagaaatccgtccacgagataaaagcattttaactttagaagaagtggatagttttttaactacgttatcatccgtaactaaagaatcgcatcaaataaaattattgactgatgtagcatctgtttgtacatgtaatgatttaaaatgtgtagtcatgcttattgataaagatctaaaaattaaagcgggtcctcggtacgtacttaacgctattagtcctaatgcctatgatgtgtttagaaaatctaataacttgaaagagataatagaaaattcatctaaacaaaatctagactctatatctatttctgttatgactccaattaatcccatgttagcggaatcgtgtgattctgtcaataaggcgtttaaaaaatttccatcaggaatgtttgcggaagtcaaatacgatggtgaaagagtacaagttcataaaaataataacgagtttgccttctttagtagaaacatgaaaccagtactctctcataaagtggattatctcaaagaatacataccgaaagcatttaaaaaagctacgtctatcgtattggattctgaaattgttcttgtagacgaacataatgtaccgctcccgtttggaagtttaggtatacacaaaaagaaagaatataaaaactctaacatgtgtttgttcgtgtttgactgtttgtactttgatggattcgatatgacggacattccattgtacgaacgaagatcttttctcaaagatgttatggttgaaatacccaatagaatagtattctcagagttgacgaatattagtaacgagtctcagttaactgacgtattggatgatgcactaacgagaaaattagaaggattggtcttaaaagatattaatggagtatacgaaccgggaaagagaagatggttaaaaataaagcgagactatttgaacgagggttccatggcagattctgccgatttagtagtactaggtgcctactatggtaaaggagcaaagggtggtatcatggcagtctttctaatgggttgttacgacgatgaatccggtaaatggaagacggttaccaagtgttcaggacacgatgataatacgttaagggagttgcaagaccaattaaagatgattaaaattaacaaggatcccaaaaaaattccagagtggttagtagttaataaaatctatattcccgattttgtagtagaggatccgaaacaatctcagatatgggaaatttcaggagcagagtttacatcttccaagtcccataccgcaaatggaatatccattagatttcctagatttactaggataagagaggataaaacgtggaaagaatctactcatctaaacgatttagtaaacttgactaaatcttaatagttacatacaaactgaaaattaaaataacactatttagttggtggtcgccatggatggtgttattgtatactgtctaaacgcgctagtaaaacatggcgaggaaataaatcatataaaaaatgatttcatgattaaaccatgttgtgaaagagtttgtgaaaaagtcaagaacgttcacattggcggacaatctaaaaacaatacagtgattgcagatttgccatatatggataatgcggtatccgatgtatgcaattcactgtataaaaagaatgtatcaagaatatccagatttgctaatttgataaagatagatgacgatgacaagactcctactggtgtatataattattttaaacctaaagatgccattcctgttatcatatctataggaaaggataaagatgtctgtgaactattaatctcatcagacatatcgtgtgcatgcgtggagttaaattcatatcacgtagccattcttcccatggatgtttccttttttaccaaaggaaatgcatcattgattattctcctgtttgatttctctatcgatgcggcacctctcttaagaagtgtaaccgataataatgttattatatctagacaccagcgtctacatgacgagcttccgagttccaattggttcaagttttacataagtataaagtccgactattgttctatattatatatggttgttgatggatctgtgatgcatgcgatagctgataatagaactcacgcaattattagcaaaaatatattagacaatactacgattaacgatgagtgtagatgctgttattttgaaccacagattaggattcttgatagagatgagatgctcaatggatcatcgtgtgatatgaacagacattgtattatgatgaatttacctgatgtaggcgaatttggatctagtatgttggggaaatatgaacctgacatgattaagattgctctttcggtggctggtaatttaataagaaatcgagactacattcccgggagacgaggatatagctactacgtttacggtatagcctctagataatttttttaagcacgaaataaaaaacataattttaaaccaatctatttcatactattttgtgtgatcaccatggacataaagatagatattagtatttctggtgataaatttacggtgactactaggagggaaaatgaagaaagaaaaaaatatctacctctccaaaaagaaaaaactactgatgttatcaaacctgattatcttgagtacgatgacttgttagatagagatgagatgtttactattctagaggaatattttatgtacagaggtctattaggcctcagaataaaatatggacgactctttaacgaaattaaaaaattcgacaatgatgcggaagaacaattcggtactatagaagaactcaagcagaaacttagattaaattctgaagagggagcagataactttatagattatataaaggtacaaaaacaggatatcgtcaaacttactgtatacgattgcatatctatgataggattgtgtgcatgcgtggtagatgtttggagaaatgagaaactgttttctagatggaaatattgtttacgagcgattaaactgtttattgatgatcacatgcttgataagataaaatctatactgcagaatagactagtatatgtggaaatgtcatagaaagttaaaagttaatgagagcaaaaatatataaggttgtattccatatttgttatttttttctgtaatagttagaaaaatacattcgatggtctatctatcagattattatgtgttataaggtactttttctcataataaactagagtatgagtaagatagtgtttttcaaaacatataaatctaaaattgatggatgagatatacagctattaatttcgaaaatatattttaatctgataactttaaacatggatttttaatggtggtttaacgttttaaaaaaagattttgttattgtagtatatgataatattaaaagatggatataaagaatttgctgactgcatgtactattttttacattactacattggctacggcagatatacctacttcgtcactgccacacgctccggtaaacggggcatgtgacgagggagaatatcttgataagaggcataatcaatgttgtaatcagtgtccacctggagaatttgccaaggttagatgtaatggtaacgataacacaaaatgtgaacgctgcccacctcatacatataccgcaatccccaattactctaatggatgtcatcaatgtagaaaatgcccaacaggatcatttgataaggtaaagtgtaccggaacacagaacagtaaatgttcgtgtcttcctggttggtattgcgctactgattcttcacagactgaagattgtcgagattgtataccaaaaaggagatgtccatgcggatactttggtggaatagatgaacaaggaaatcctatttgtaaatcgtgttgtgttggtgaatattgcgactacctacgtaattatagacttgatccatttcctccatgcaaactatctaaatgtaattaattatgattttgatgataatgttaccatacattatatcgctacttggttagtgtattattcagtatgaagacctattaataattacttatcttttgacgatcttgttataattataatataaaaatacttatggcatagtaactcataattgctgacgcgataaattcgtaataatctgttttgttcaaatttttataaggaatctacaggcataaaaataaaaatataatttataatatactcttacagcgcgccatcatgaataacagcagtgaattgattgctgttattaatggatttagaaatagtggacgattttgtgatattaatatagttattaatgatgaaaggataaacgctcacagactcatcctatctggagcctccgaatatttttccattctgttttccaataattttatcgattctaatgaatacgaagttaatctaagtcatttagattatcaaagtgttaacgatttgatcgattacatttatgggatacctttgagcctaactaacgataacgtgaaatatattctttcaaccgctgattttttacaaattggatctgctattacggagtgtgaaaattacatacttaaaaatctttgttctagaaactgtatcgatttctacatatacgctgataaatataataacaagaaaatagaatcagcgtcgtttaacacaatattacaaaatattttgagactcatcaacgatgaaaactttaaatacttaacagaggaatcaatgataaaaattttaagcgatgatatgttaaatataaaaaatgaggatttcgccccactaattctcattaaatggttagagagtactcaacaaccatgcaccgtcgagttacttaaatgcctcagaatatcattgctttccccacaagttataaaatcactttatagtcatcgactggttagttcaatctacgaatgtataacattcttaaacaatatagcattcttggatgaatcatttcctagataccatagcatcgagttgatatctatcggtataagtaattcgcatgataagatttccataaactgctacaatcataaaaaaaatacatgggaaatgatatcttcacgtagatataggtgtagtttcgcagtggccgtcctggataatattatctatatgatgggtggatatgatcagtccccgtatagaagttcaaaggttatagcgtacaatacatgtacaaattcttggatatatgatataccagagctaaaatatcctcgttctaattgtgggggactggctgatgacgaatacatttattgtataggcggcatacgcgatcaggattcatcgttgacatctagtattgatagatggaagccatcaaaaccatattggcagaagtatgctaaaatgcgcgaaccaaaatgtgatatgggggttgcgatgttaaacggattaatatatgttataggtggaatcgttaaaggtgacacgtgtaccgacgcactagagagtttatcagaagatggatggatgaagcatcaacgtcttccaataaaaatgtccaatatgtcgacgattgttcatgatggcaagatttatatatctggaggttacaacaatagtagtgtagttaatgtaatatcgaatctagtccttagctataattcgatatatgatgaatggaccaaattatcatcattaaacattcctagaattaatcccgctctatggtcagcgcataataaattatatgtaggaggaggaatatctgatgatgttcgaactaatacatctgagacatacgacaaagaaaaagattgttggacattggataatggtcacgtgttaccacgcaattatataatgtataaatgcgaaccgattaaacataaatatccattggaaaaaacacagtacacgaatgattttctaaagtatttggaaagttttataggtagttgatagaacaaaatacataattttgtaaaaataaatcactttttatactaatatgacacgattaccaatacttttgttactaatatcattagtatacgctacaccttttcctcagacatctaaaaaaataggtgatgatgcaactctatcatgtaatcgaaataatacaaatgactacgttgttatgagtgcttggtataaggagcccaattccattattcttttagctgctaaaagcgacgtcttgtattttgataattataccaaggataaaatatcttacgactctccatacgatgatctagttacaactatcacaattaaatcattgactgctagagatgccggtacttatgtatgtgcattctttatgacatcaactacaaatgacactgataaagtagattatgaagaatactccacagagttgattgtaaatacagatagtgaatcgactatagacataatactatctggatctacacattcaccggaaactagttctaagaaacctgattatatagataattctaattgctcgtcggtattcgaaatcggtacccggggatcagcttgcatgcctgcagcaattcccgaggctgtagccgacgatggtgcgccaggagagttgttgattcattgtttgcctccctgctgcggtttttcaccgaagttcatgccagtccagcgtttttgcagcagaaaagccgccgacttcggtttgcggtcgcgagtgaagatccctttcttgttaccgccaacgcgcaatatgccttgcgaggtcgcaaaatcggcgaaattccatacctgttcaccgacgacggcgctgacgcgatcaaagacgcggtgatacatatccagccatgcacactgatactcttcactccacatgtcggtgtacattgagtgcagcccggctaacgtatccacgccgtattcggtgatgataatcggctgatgcagtttctcctgccaggccagaagttctttttccagtaccttctctgccgtttccaaatcgccgctttggacataccatccgtaataacggttcaggcacagcacatcaaagagatcgctgatggtatcggtgtgagcgtcgcagaacattacattgacgcaggtgatcggacgcgtcgggtcgagtttacgcgttgcttccgccagtggcgcgaaatattcccgtgcaccttgcggacgggtatccggttcgttggcaatactccacatcaccacgcttgggtggtttttgtcacgcgctatcagctctttaatcgcctgtaagtgcgcttgctgagtttccccgttgactgcctcttcgctgtacagttctttcggcttgttgcccgcttcgaaaccaatgcctaaagagaggttaaagccgacagcagcagtttcatcaatcaccacgatgccatgttcatctgcccagtcgagcatctcttcagcgtaagggtaatgcgaggtacggtaggagttggccccaatccagtccattaatgcgtggtcgtgcaccatcagcacgttatcgaatcctttgccacgcaagtccgcatcttcatgacgaccaaagccagtaaagtagaacggtttgtggttaatcaggaactgttcgcccttcactgccactgaccggatgccgacgcgaagcgggtagatatcacactctgtctggcttttggctgtgacgcacagttcatagagataaccttcacccggttgccagaggtgcggattcaccacttgcaaagtcccgctagtgccttgtccagttgcaaccacctgttgatccgcatcacgcagttcaacgctgacatcaccattggccaccacctgccagtcaacagacgcgtggttacagtcttgcgcgacatgcgtcaccacggtgatatcgtccacccaggtgttcggcgtggtgtagagcattacgctgcgatggattccggcatagttaaagaaatcatggaagtaagactgctttttcttgccgttttcgtcggtaatcaccattcccggcgggatagtctgccagttcagttcgttgttcacacaaacggtgatacgtacacttttcccggcaataacatacggcgtgacatcggcttcaaatggcgtatagccgccctgatgctccatcacttcctgattattgacccacactttgccgtaatgagtgaccgcatcgaaacgcagcacgatacgctggcctgcccaacctttcggtataaagacttcgcgctgataccagacgttgcccgcataattacgaatatctgcatcggcgaactgatcgttaaaactgcctggcacagcaattgcccggctttcttgtaacgcgctttcccaccaacgctgatcaattccacagttttcgcgatccagactgaatgcccacaggccgtcgagttttttgatttcacgggttggggtttctacaggacgtaacattctagtcgaggaattcatttatagcatagaaaaaaacaaaatgaaattctactatatttttacatacatatattctaaatatgaaagtggtgattgtgactagcgtagcatcgcttctagacatctatatactatatagtaataccaatactcaagactacgaaactgatacaatctcttatcatgtgggtaatgttctcgatgtcgatagccatatgcccggtagttgcgatatacataaactgatcactaattccaaacccacccgctttttatagtaagtttttcacccataaataataaatacaataattaatttctcgtaaaagtagaaaatatattctaatttattgcacggtaaggaagtagaatcataaagaacagtgacggatccccgatccccgacctgcaggcatgcaagctcgactccggaaccaattactgataatgtagaagatcatacagacaccgtcacatacactagtgatagcattaatacagtaagtgcatcatctggagaatccacaacagacgagactccggaaccaattactgataaagaagatcatacagttacagacactgtctcatacactacagtaagtacatcatctggaattgtcactactaaatcaaccaccgatgatgcggatctttatgatacgtacaatgataatgatacagtaccaccaactactgtaggcggtagtacaacctctattagcaattataaaaccaaggactttgtagaaatatttggtattaccgcattaattatattgtcggccgtggcaattttctgtattacatattatatatataataaacgttcacgtaaatacaaaacagagaacaaagtctagatttttgacttacataaatgtctgggatagtaaaatctatcatattgagcggaccatctggtttaggaaagacagccatagccaaaagactatgggaatatatttggatttgtggtgtcccataccactagatttcctcgtcctatggaacgagaaggtgttgattaccattacgttaacagagaggccatctggaagggaatagccgccggaaactttctagaacatactgagtttttaggaaatatttacggaacttctaaaacagctgtgaatacagcggctattaataatcgtatttgtgtgatggatctaaacatcgacggtgttagaagtcttaaaaatacgtacctaatgccttactcggtgtatataagacctacctctcttaaaatggttgagaccaagcttcgtcgtagaaacactgaagctaacgatgagattcatcgtcgtgtgatgttggcaaaaactgacatggatgaggcaggtgaagccggtctattcgacactattatcattgaagatgatgtgaatttagcatatagtaagttaattcagatactacaggaccgtattagaatgtattttaacactaattagagacttaagacttaaaacttgataattaataatataactcgtttttatatgtgtctatttcaacgtctaatgtattagttaaatattaaaacttaccacgtaaaacttaaaatttaaaatgatatttcattgacagatagatcacacattatgaactttcaaggacttgtgttaactgacaattgcaaaaatcaatgggtcgttggaccattaataggaaaaggtggattcggtagtatttatactactaatgacaataattatgtagtaaaaatagagcccaaagctaacggatcattatttaccgaacaggcattttatactagagtacttaaaccatccgttatcgaagaatggaaaaaatctcacaatataaagcacgtaggtcttatcacgtgcaaggcatttggtctatacaaatccattaatgtggaatatcgattcttggtaattaatagattaggtgcagatctagatgcggtgatcagagccaataataatagactaccaaaaaggtcggtgatgttgatcggaatcgaaatcttaaataccatacaatttatgcacgagcaaggatattctcacggagatattaaagcgagtaatatagtcttagatcaaatagataagaataaattatatctagtggattacggattggtttctaaattcatgtctaatggcgaacatgttccatttataagaaatccaaataaaatggataacggtactctagaatttacacctatagattcgcataaaggatacgttgtatctagacgtggagatctagaaacacttggatattgtatgattagatggttgggaggtatcttaccatggactaagatatctgaaacaaagaattgtgcattagtaagtgccacaaaacagaaatatgttaacaatactgcgactttgttaatgaccagtttgcaatatgcacctagagaattgctgcaatatattaccatggtaaactctttgacatattttgaggaacccaattacgacaagtttcggcacatattaatgcagggtgtatattattaagtgtggtgtttggtcgataaaaattaaaaaataacttaatttattattgatctcgtgtgtacaaccgaaatcatggcgatgttttacgcacacgctctcggtgggtacgacgagaatcttcatgcctttcctggaatatcatcgactgttgccaatgatgtcaggaaatattctgttgtgtcagtttataataacaagtatgacattgtaaaagacaaatatatgtggtgttacagtcaggtgaacaagagatatattggagcactgctgcctatgtttgagtgcaatgaatatctacaaattggaaatccgatccatgatcaagaaggaaatcaaatctctatcatcacatatcgccacaaaaactactatgctctaagcggaatcgggtacgagagtctagacttgtgtttggaaggagtagggattcatcatcacgtacttgaaacaggaaacgctgtatatggaaaagttcaacatgattattctactatcaaagagaaggccaaagaaatgagtgcacttagtccaggacctatcatcgattaccacgtctggataggagattgtatctgtcaagttactgctgtggacgtacatggaaaggaaattatgaaaatgagattcaaaaagggtgcggtgcttccgatcccaaatctggtaaaagttaaacttggggagaatgatacagaaaatctttcttctactatatcggcggcaccatcgaggtaaccacctctctggaagacagcgtgaatcatgtactcatgaaacgtttggaaactatacgccatatgtggtctgttgtatatgatcattttgatattgtgaatggtaaagaatgctgttatgtgcatacgcattcatctaatcaaaatcctataccgagtactgtaaaaacaaatttgtacatgaagactatgggatcatgcattcaaatggattccatggaagctctagagtatcttagcgaactgaaggaatcaggtggatggagtcccagaccagaaatgcaggaatttgaatatccagatggagtggaagacactgaatcaattgagagattggcagaggagttcttcaatagatcagaacttcaggctggtgaatcagtcaaatttggtaattctattaattgttaaacatacatctgtttcagctaagcaactaagaacacgtatacggcagcagcttccttctatactctcatcttttaccaacacaaagggtggatatttgttcattggagttgataataatacacacaaagtatttggattcacggtgggttacgactacctcagactgatagagaatgatatagaaaagcatatcaaaagacttcgtgttgtgcatttctgtgagaagaaagaggacatcaagtacgcgtgtcgattcatcaaggtatataaacctggggatgagactacctcgacatacgtgtgcgctatcaaagtggaaagatgctgttgtgctgtgtttgcagattggccagaatcatggtatatggatactaatggtatcaagaagtattctccagatgaatgggtgtcacatataaaattttaattaatgtaactatagagaacaaataataaggttgtaatatcatatagacaataactaacaattaattagtaactgttatctcttttttaactaaccaactaactatatacctattaatacatcgtaattatagttcttaacatctattaatcattaattcgcttctttaattttttataaactaacattgttaattgaaaagggataacatgttacagaatataaattatatatggatttttttaaaaaggaaatacttgactggagtatatatttatctcttcattatatagcacgcgtgttttccaatttttccacatcccatataatacaggattataatctcgttcgaacatacgagaaagtggataaaacaatagttgattttttatctaggttgccaaatttattccatattttagaatatggggaaaatattctacatatttattctatggatgatgctaatacgaatattataattttttttctagatagagtattaaatattaataagaacgggtcatttatacacaatctcgggttatcatcatccattaatataaaagaatatgtatatcaattagttaataatgatcatccagataataggataagactaatgcttgaaaatggacgtagaacaagacattttttgtcctatatatcagatacagttaatatctatatatgtattttaataaatcatggattttatatagatgccgaagacagttacggttgtacattattacatagatgtatatatcactataagaaatcagaatcagaatcatacaatgaattaattaagatattgttaaataatggatcagatgtagataaaaaagatacgtacggaaacacaccttttatcctattatgtaaacacgatatcaacaacgtggaattgtttgagatatgtttagagaatgctaatatagactctgtagactttaatagatatacacctcttcattatgtctcatgtcgtaataaatatgattttgtaaagttattaatttctaaaggagcaaatgttaatgcgcgtaataaattcggaactactccattttattgtggaattatacacggtatctcgcttataaaactatatttggaatcagacacagagttagaaatagataatgaacatatagttcgtcatttaataatttttgatgctgttgaatctttagattatctattatccagaggagttattgatattaactatcgtactatatacaacgaaacatctatttacgacgctgtcagttataatgcgtataatacgttggtctatctattaaacaaaaatggtgattttgagacgattactactagtggatgtacatgtatttcggaagcagtcgcaaacaacaacaaaataataatggaagtactattgtctaaacgaccatctttgaaaattatgatacagtctatgatagcaattactaaacataaacagcataatgcagatttattgaaaatgtgtataaaatatactgcgtgtatgaccgattatgatactcttatagatgtacagtcgctacagcaatataaatggtatattttaagatgtttcgatgaaatagatatcatgaagagatgttatataaaaaataaaactgtattccaattagttttttgtatcaaagacattaatactttaatgagatacggtaaacatccttctttcgtgaaatgcactagtctcgacgtatacggaagtcgtgtacgtaatatcatagcatctattagatatcgtcagagattaattagtctattatccaagaagctggatcctggagataaatggtcgtgttttcctaacgaaataaaatataaaatattggaaaactttaacgataacgaactatccacatatctaaaaatcttataaacattattaaaatataaaatctaagtaggataaaatcacactacatcattgtttccttttagtgctcgacagtgtatactatttttaacgctcataaataaaaatgaaaacgatttccgttgttacgttgttatgcgtactacctgctgttgtttattcaacatgtactgtacccactatgaataacgctaaattaacgtctaccgaaacatcgtttaatgataaccagaaagttacgtttacatgtgatcagggatatcattctttggatccaaatgctgtctgtgaaacagataaatggaaatacgaaaatccatgcaaaaaaatgtgcacagtttctgattatgtctctgaactatataataaaccgctatacgaagtgaattccaccatgacactaagttgcaacggcgaaacaaaatattttcgttgcgaagaaaaaaatggaaatacttcttggaatgatactgttacgtgtcctaatgcggaatgtcaacctcttcaattagaacacggatcgtgtcaaccagttaaagaaaaatactcatttggggaatatatgactatcaactgtgatgttggatatgaggttattggtgcttcgtacataagttgtacagctaattcttggaatgttattccatcatgtcaacaaaaatgtgatatgccgtctctatctaacggattaatttccggatctacattttctatcggtggcgttatacatcttagttgtaaaagtggttttacactaacggggtctccatcatccacatgtatcgacggtaaatggaatcccatactcccaatatgtgtacgaactaacgaaaaatttgatccagtggatgatggtcccgacgatgagacagatttgagcaaactctcgaaagacgttgtacaatatgaacaagaaatagaatcgttagaagcaacttatcatataatcatagtggcgttgacaattatgggcgtcatatttttaatctccgttatagtattagtttgttcctgtgacaaaaataatgaccaatataagttccataaattgctaccgtaaatataaatccgttaaaataattaataatttaataacaaacaagtatcaaaagattaaagacttatagctagaatcaattgagatgtcttcttcagtggatgttgatatctacgatgccgttagagcatttttactcaggcactattataacaagagatttattgtgtatggaagaagtaacgccatattacataatatatacaggctatttacaagatgcgccgttataccgttcgatgatatagtacgtactatgccaaatgaatcacgtgttaaacaatgggtgatggatacacttaatggtataatgatgaatgaacgcgatgtttctgtaagcgttggcaccggaatactattcatggaaatgtttttcgattacaataaaaatagtatcaacaatcaactaatgtatgatataattaatagcgtatctataattctagctaatgagagatatagaagcgcttttaacgacgatggtatatacatccgtagaaatatgattaacaagttgtacggatacgcatctctaactactattggcacgatcgctggaggtgtttgttattatctgttgatgcatctagttagtttgtataaataattatttcaatatactagttaaaattttaagattttaaatgtataaaaaactaataacgtttttatttgtaataggtgcattagcatcctattcgaataatgagtacactccgtttaataaactgagtgtaaaactctatatagatggagtagataatatagaaaattcatatactgatgataataatgaattggtgttaaattttaaagagtacacaatttctattattacagagtcatgcgacgtcggatttgattccatagatatagatgttataaacgactataaaattattgatatgtataccattgactcgtctactattcaacgcagaggtcacacgtgtagaatatctaccaaattatcatgccattatgataagtacccttatattcacaaatatgatggtgatgagcgacaatattctattactgcagagggaaaatgctataaaggaataaaatatgaaataagtatgatcaacgatgatactctattgagaaaacatactcttaaaattggatctacttatatatttgatcgtcatggacatagtaatacatattattcaaaatatgatttttaaaaatttaaaatatattatcacttcagtgacagtagtcaaataacaaacaacaccatgagatatattataattctcgcagttttgttcattaatagtatacatgctaaaataactagttataagtttgaatccgtcaattttgattccaaaattgaatggactggggatggtctatacaatatatcccttaaaaattatggcatcaagacgtggcaaacaatgtatacaaatgtaccagaaggaacatacgacatatccgcatttccaaagaatgatttcgtatctttctgggttaaatttgaacaaggcgattataaagtggaagagtattgtacgggactatgcgtcgaagtaaaaattggaccaccgactgtaacattgactgaatacgacgaccatatcaatttgtacatcgagcatccgtatgctactagaggtagcaaaaagattcctatttacaaacgcggtgacatgtgtgatatctacttgttgtatacggctaacttcacattcggagattctaaagaaccagtaccatatgatatcgatgactacgattgcacgtctacaggttgcagcatagactttgtcacaacagaaaaagtgtgcgtgacagcacagggagccacagaagggtttctcgaaaaaattactccatggagttcgaaagtatgtctgacacctaaaaagagtgtatatacatgcgcaattagatccaaagaagatgttcccaatttcaaggacaaaatggccagagttatcaagagaaaatttaatacacagtctcaatcttatttaactaaatttctcggtagcacatcaaatgatgttaccacttttcttagcatgcttaacttgactaaatattcataactaatttttattaatgatacaaaaacgaaataaaactgcatattatacactggttaacgcccttataggctctaaccattttcaagatgaggtccctgattatagtccttctgttcccctctatcatctactccatgtctattagacgatgtgagaagactgaagaggaaacatggggattgaaaatagggttgtgtataattgccaaagatttctatcccgaaagaactgattgcagtgttcatctcccaactgcaagtgaaggattgataactgaaggcaatggattcagggatatacgaaacaccgataaattataaaaaaagcaatgtgtccgctgtttccgttaataatactattttcgtaactggcggattattcataaataactctaatagcacgatcgtggttaacaatatggaaaaacttgacatttataaagacaaacaatggtcgattatagaaatgcctatggctagggtatatcacggcattgactcgacatttggaatgttatattttgccggaggtctatccgttaccgaacaatatggtaatttagagaaaaacaacgagatatcttgttacaatcctagaacgaataagtggtttgatatttcatatactatttataagatatccatatcatcattgtgtaaactaaataacgtcttctatgtatttagtaaggacattggatatgtggaaaagtatgatggtgcatggaagttagtacatgatcgtctccccgctataaaggcattatcaacttctccttattgattgaaaatgaaaatataaatagtttttatgtatagcagtattaccctatagttttattgcttactactaacatggatacagatgttacaaatgtagaagatatcataaatgaaatagatagagagaaagaagaaatactaaaaaatgtagaaattgaaaataataaaaacattaacaagaatcatcccaatgaatatattagagaagcactcgttattaataccagtagtaatagtgattccattgataaagaagttatagaatgtatcagtcacgatgtaggaatatagatcatatctactaatttttataatcgatacaaaacataaaaaacaactcgttattacatagcaggcatggaatccttcaagtattgttttgataacgatggcaagaaatggattatcggaaatactttatattctggtaattcaatactctataaggtcagaaaaaatttcactagttcgttctacaattacgtaatgaagatagatcacaaatcacacaagccattgttgtctgaaatacgattctatatatctgtattggatcctttgactatcgacaactggacacgggaacgtggtataaagtatttggctattccagatctgtatggaattggagaaaccgatgattatatgttcttcgttataaagaattcgggaagagtattcgccccaaaggatactgaatcagtcttcgaagcatgcgtcactatgataaacacgttagagtttatacactctcgaggatttacccatggaaaaatagaaccgaggaatatactgattagaaataaacgtctttcactaattgactattctagaactaacaaactatacaagagtggaaactcacatatagattacaacgaggacatgataacttcaggaaatatcaattatatgtgtgtagacaatcatcttggagcaacagtttcaagacgaggagatttagaaatgttgggatattgcatgatagaatggttcggtggcaaacttccatggaaaaacgaaagtagtataaaagtaataaaacaaaaaaaagaatataaaaaatttatagctactttctttgaggactgttttcctgaaggaaatgaacctctggaattagttagatatatagaattagtatacacgttagattattctcaaactcctaattatgacagactacgtaaactgtttatacaagattgaaattatattcttttttttatagagtgtggtagtgttacggatatctaatattaatattagactatctctatcgcgctacacgaccaatatcgattactatggatatcttctatgaaaggagagaatgtatttatttctccagcgtcaatctcgtcagtattgacaatactgtattatggagctaatggatccactgctgaacagctatcaaaatatgtagaaacggaggagaacacggataaggttagcgctcagaatatctcattcaaatccatgaataaagtatatgggcgatattctgccgtgtttaaagattcctttttgagaaaaattggcgataagtttcaaactgttgacttcactgattgtcgcactatagatgcaatcaacaagtgtgtagatatctttactgaggggaaaatcaatccactattggatgaaccattgtctcctagcaattagtgccgtatactttaaagcaaaatggttgacgccattcgaaaaggaatttaccagtgattatcccttttacgtatctccgacggaaatggtagacgtaagtatgatgtctatgtacggcaaggcatttaatcacgcatctgtaaaagaatcattcggcaacttttcaatcatagaactgccatatgttggagatactagtatgatggtcattcttccagacaagattgatggattagaatccatagaacaaaatctaacagatacaaattttaagaaatggtgtgactttatggatgctatgtttatagatgttcacattcccaagtttaaggtaacaggctcgtataatctggtggatactctagtaaagtcaggactgacagaggtgttcggttcaactggagattatagcaatatgtgtaatttagatgtgagtgtcgacgctatgatccacaaaacgtatatagatgtcaatgaagagtatacagaagcagctgcagcaacttctgtactagtggcagactgtgcatcaacaattacaaatgagttctgtgcagatcatccgttcatctatgtgattaggcatgttgatggaaaaattcttttcgttggtagatattgctctccgacaactaattgttaaccattttttttaaaaaaaatagaaaaaacatgtggtattagtgcaggtcgttgttcttccaattgcaattggtaagatgacggccaactttagtacccacgtcttttcaccacagcactgtggatgtgacagactgaccagtattgatgacgtcaaacaatgtttgactgaatatatttattggtcgtcctatgcataccgcaacaggcaatgcgctggacaattgtattccacactcctctcttttagagatgatgcggaattagtgttcatcgacattcgcgagctggtaaaaaatatgccgtgggatgatgtcaaagattgtacagaaatcatccgttgttatataccggatgagcaaaaaaccatcagagagatttcggccatcatcggactttgtgcatatgctgctacttactggggaggtgaagaccatcccactagtaacagtctgaacgcattgtttgtgatgcttgagatgctaaattacgtggattataacatcatattccggcgtatgaattgatgagttgtacatcttgacattttctttcttctcttctccctttcttctcttctcccttcctccctcttctccctttcccagaaacaaacttttttacccactataaaataaaatgagtatactacctattatatttcttcctatatttttttattcttcattcgttcagacttttaacgcgtctgaatgtatcgacaaagggcaatattttgcatcattcatggagttagaaaacgagccagtaatcttaccatgtcctcaaataaatacgctatcatccggatataatatattagatattttatgggaaaaacgaggagcggataatgatagaattataccgatagataatggtagcaatatgctaattctgaacccgacacaatcagactctggtatttatatatgcattaccacgaacgaaacctactgtgacatgatgtcgttaaatttgacaatcgtgtctgtctcagaatcaaatatagatcttatctcgtatccacaaatagtaaatgagagatctactggcgaaatggtatgtcccaatattaatgcatttattgctagtaacgtaaacgcagatattatatggagcggacatcgacgccttagaaataagagacttaaacaacggacacctggaattattaccatagaagatgttagaaaaaatgatgctggttattatacatgtgttttagaatatatatacggtggcaaaacatataacgtaaccagaattgtaaaattagaggtacgggatagaataataccttctactatgcaattaccagatggcattgtaacttcaataggtagtaatttgactattgcatgcagagtatcgttgagacctcccacaacggacaccgacgtcttttggataagtaatggtatgtattacgaagaagatgatggggacggaaacggtagaataagtgtagcaaataaaatctatatgaccgataagagacgtgttattacatcccggttaaacattaatcctgtcaaggaagaagatgctacaacgtttacgtgtatggcgtttactattcctagcatcagcaaaacagttactgttagtataacgtgaatgtatgttgttacatttccatgtcaattgagtttataagaatttttatacattatcttccaacaaacaattgacgaacgtattgctatgattaactcccacgatactatgcatattattaatcattaacttgcagactatacctagtgctattttgacatactcgtgttcttgtgtaattgcggtatctatattattaaagtacgtaaatctagctatagttttattatttaattttagataatataccgtctccttatttttaaaaattgccacatcctttattaaatcatgaatgggaatttctatgtcatcgttagtatattgtgaacaacaagagcagatatctataggaaagggtggaatgcgatacattgatctatgtagttttaaaacacacgcgaactttgaagaatttatataaatcattccatcgatacatccttctatgttgacatgtatatatccaggaattcttttattaatgtcaggaaatgtataaactaaaacattgcccgaaagcggtgcctctatctgcgttatatccgttcttaacttacaaaatgtaaccaatacctttgcatgacttgttttgttcggcaacgttagtttaaacttgacgaatggattaattacaatagcatgatccgcgcatctattaagtttttttactttaacgcccttgtatgtttttacagagactttatctaaatttctagtgcttgtatgtgttataaatataacgggatatagaaccgaatcacctaccttagatacccaattacattttatcagatccagataataaacaaattttgtcgccctaactaattctatattgttatatattttacaattggttatgatatcatgtaataacttggagtctaacgcgcatcgtcgtacgtttatacaattgtgatttagtgtagtatatctacacatgtatttttccgcactatagtattctggactagtgataaaactatcgttatatctgtcttcaatgaactcatcgagatattgctctctgtcatattcatacacctgcataaactttctagacatcttacaatccgtgttattttaggatcatatttacatatttacgggtatatcaaagatgttagattagttaatgggaatcgtctataataatgaatattaaacaattatatgaggacttttaccacaaagcatcataaaaatgagtcgtcgtctgatttatgttttaaatatcaaccgcaaatcaactcataaaatacaagagaatgaaatatatacatattttagtcattgcaatatagaccatacttctacagaacttgattttgtagttaaaaactatgatctaaacagacgacaacctgtaactgggtatactgcactacactgctatttgtataataattactttacaaacgatgtactgaagatattattaaatcatgacgtaaatgtaacgatgaaaaccagtagcggacgtatgcctgtttatatattgcttactagatgttgtaatatttcacatgatgtagtgatagatatgatagacaaagataaaaaccacttattacatagagactattccaacctattactagagtatataaaatctcgttacatgttattgaaggaagaggatatcgatgagaacatagtatccactttattagataagggaatcgatcctaactttaaacaagacggatatacagcgttacattattattatttgtgtctcgcacacgtttataaactaggtgagtgtagaaaaccgataacgataaaaaaggccaagcgaattatttctttgtttatacaacatggagctaatctaaacgcgttagataattgtggtaatacaccattccatttgtatcttagtattgaaatgtgtaataatattcatatgactaaaatgctgttgacttttaatccgaatttcaaaatatgtaataatcatggattaacgcctatactatgttatataacttccgactacatacaacacgatattcttgttatgttaatacatcactatgaaacaaatgttggagaaatgccgatagatgagcgtcgtatgatcgtattcgagtttatcaaaacatattctacacgtccggcagattcgataacttatttgatgaataggtttaaaaatataaatatttatacccgctatgaaggaaagacattattacacgtagcatgtgaatataataatacacaagtaatagattatcttatacgtatcaacggagatataaatgcgttaaccgacaataacaaacacgctacacaactcattatagataacaaagaaaattccccatataccattaattgtttactgtatatacttagatatattgtagataagaatgtgataagatcgttggtggatcaacttccatctctacctatcttcgatataaaatcatttgagaaattcatatcctactgtatacttttagatgacacattttacgataggcacgttaagaatcgcgattctaaaacgtatcgatacgcattttcaaaatacatgtcgtttgataaatacgatggtataataactaaatgtcacgacgaaacaatgttactcaaactgtccactgttctagacactacactatatgcagttttaagatgtcataattcgagaaagttaagaagatacctcaacgagttaaaaaaatataataacgataagtcctttaaaatatattctaatattatgaatgagagataccttaatgtatattataaagatatgtacgtgtcaaaggtatatgataaactatttcctgttttcacagataaaaattgtctactaacattactaccttcagaaattatatacgaaatattatacatgctgacaattaacgatctttataatatatcgtatccacctaccaaagtatagttgtatttttctcatgcgatgtgtgtaaaaaaactgatattatataaatattttagtgccgtataataaagatgacgatgaaaatgatggtacatatatatttcgtatcattattgttattgctattccacagttacgccatagacatcgaaaatgaaatcacagaattcttcaataaaatgagagatactctaccagctaaagactctaaatggttgaatccagcatgtatgttcggaggcacaatgaatgatatagccgctctaggagagccattcagcgcaaagtgtcctcctattgaagacagtcttttatcgcacagatataaagactatgtggttaaatgggagaggctagaaaagaatagacggcgacaggtttctaataaacgtgttaaacatggtgatttatggatagccaactatacatctaaattcagtaaccgtaggtatttgtgcaccgtaactacaaagaatggtgactgtgttcagggtatagttagatctcatattaaaaaacctccttcatgcattccaaaaacatatgaactaggtactcatgataagtatggcatagacttatactgtggaattctttacgcaaaacattataataatataacttggtataaagataataaggaaattaatatcgacgacattaagtattcacaaacgggaaaggaattaattattcataatccagagttagaagatagcggaagatacgactgttacgttcattacgacgacgttagaatcaagaatgatatcgtagtatcaagatgtaaaatacttacggttataccgtcacaagaccacaggtttaaactaatactagatccgaaaatcaacgtaacgataggagaacctgccaatataacatgcactgctgtgtcaacgtcattattgatcgacgatgtactgattgaatgggaaaatccatccggatggcttataggattcgattttgatgtatactctgttttaactagtagaggcggtatcaccgaggcgaccttgtactttgaaaatgttactgaagaatatataggtaatacatataaatgtcgtggacacaactattattttgaaaaaacccttacaactacagtagtattggagtaaatatacaatgcatttttatatacattactgaattattattactgaattattattactgaattattattaattatatcgtatttgtgctatagaatggatgaagatacgcgactatctaggtatttgtatctcaccgatagagaacatataaatgtagactctattaaacagttgtgtaaaatatcagatcctaatgcatgttatagatgtggatgtacggctttacatgagtacttttataattatagatcagtcaacggaaaatacaagtatagatacaacggttactatcaatattattcatctagcgattatgaaaattataatgaatattattatgatagaactggtatgaacagtgagagtgataatatatcaatcaaaacagaatatgaattctatgatgaaacacaagatcaaagtacacaactagtaggttacgacattaaactcaaaaccaatgaggatgattttatggctatgatagatcagtgggtgtccatgattatatagatgaatcaattaataaagtagtatatggaagagagtctcacgtaagatggcgggatatatggcaagaacataatgatggcgtatacagtataggaaaggagtgcatagataatatatacgaagacaaccataccgtagacgaattctacaagatagacagcgtatcagatgtagatgacgcggaacacatatctccgataactaaaaaaccatagaatcagttgatgataatacctacatttctaatcttccgtataccatcaaatacaaaatattcgagcaacaataagtattttttatacctttaaaactgataaataaattttttctagtgatattttggcaagatgagaatcctatttctcatcgctttcatgtatgggtgtgttcactcatatgttaacgcggttgaaaccaaatgtccaaatctagacattgtaacatcttctggagaatttcattgttcaggatgtgtggaacatatgcctgagtttagctatatgtattggttggcaaaggatatgaaatcggacgaggataccaagtttatagaacatctgggtgatggcatcaaagaagatgaaaccgttcgtaccacagatagtggaatcgtcactctacgtaaagtccttcatgtgactgatactaataaatttgataattataggttcacttgtgtcctcgctacgctagatggcatttataaaaagaatgtttgctgaagtagttgtgtgctactatttttatttatgatataatctaatggaattaatttgaattgatatttatccaatactaaagattatattagaatcaaattaatcttttatacgagaaaaaataacgacatacgtcgtcaacaaattaaactttttatttattagttaactagcttatagaacttgctcattgttatgtttctaaaacgggtacggcatataggacaattatccgacgcaccggtttctcttcgtgttctatgccatatattgatgcatgttatgcaaaatatatgagtacacgaatccaataaaccaaagtatctatcgttttgagtaaacaacttcatagcaaattccacattctttttctttacttactctatacacgtcctcgtatttatttagtattttgatgatatccaactcagaaatggttgttgtattattgggtgtatttggagtataggtattattagctatgtaccaatttaccaaccctcttaatattgattgataatcacatcggttatccaattaataactaaattgtagtgtatatatagaccatatatgtttctatttttttgacagttacgtatagtttcagtaagttttgattgttgtattcctgtatctctagataagttagtcatatagtcccttccggcgatacgttttttccaagcccgaaattgattagccaaatgtgtatttatttttgtgatattgatataatatttcggataatgcatactgttagtcttatatcatttggttcatctatgtattgtaatattgttacatgatctatagatgatgtattgattttggcaggatcgaattccatatccgcgactaaacagtgaaaaaaatgtaaatactttttaaattttaaattagtaaaacttttttttattttttatgattccaaaaatactgaatacaaagtcctaaattataaatatggagatcatactaccacaacttattattatgtatacaaggccggtgtaatagatagatatatataattctattacaccggcagacaattaccgaccggtatttgtcgttaccaacataccgtataatatgtaatatacaattccataacccattgacagttgttatacatcaaaattgcaattcttttgattacgatgttataagaatgtagttaattgatgtatgatgttaatgtgtcctctttcctcttataacatcgtaatcaaaaacttttttataatatatacctaataatgtgtcttaatagttctcgtgattcgtcaaacaatcattcttataaaatataataaagcaacgtaaaaacacataaaaataagcgtaactaataagacaatggatatttacgacgataaaggtctacagactattaaactgtttaataatgaatttgattgtataaggaatgacatcagagaattatttaaacatgtaactgattccgatagtatacaacttccgatggaagacaattctgatattatagaaaatatcagaaaaatactatatagacgattaaaaaatgtagaatgtgttgacatcgataacacaataacttttatgaaatacgatccaaatgatgataataagcgtacgtgttctaattgggtacccttaactaataactatatggaatattgtctagtaatatatttggaaacaccgatatgtggaggcaaaataaaattataccaccctacaggaaatataaagtcggataaggatattatgtttgcaaagactctagactttaaatcaacgaaagtgttaactggacgtaaaacaattgccgttctagacatatccgtttcatataatagatcaatgactactattcactacaacgacgacgttgatatagatatacatactgataaaaatggaaaagagttatgttattgttatataacaatagatgatcattacttggttgatgtggaaactataggagttatagtcaatagatctggaaaatgtctgttagtaaataaccatctaggtataggtatcgttaaagataaacgtataagcgatagttttggagatgtatgtatggatacaatatttgacttttctgaagcacgagagttattttcattaactaatgatgataacaggaatatagcatgggacactgataaactagacgatgatacagatatatggactcccgtcacagaagatgattacaaatttctttctagactagtattgtatgcaaaatctcaatcggatactgtatttgactattatgttcttactggtgatacggaaccacccactgtattcattttcaaggtaactagattttactttaatatgccgaaataaaaaatttttgtataatatctagaggtagaggtattgtttagataaatacaaataacatagatacatcgcatacttagcatttttataaatatacataagacatacactttatacatttttgtaaaaatactcataaaaaaatttataaaaattatggcacaaccatatcttgtataggtagtttagttcgtcgagtgaacctataaacagataatagacaacacataataatgcctactaatacaagcataataccgggagatgggatatatgacgttgtagtgtttgggttttctgaacgttgatagtctactaatactacatgctgacatctaatgcctgtataaccatgagagcatctacaatacataccgtcaatatctctagcgtggatacagtcaccgtgtaaacaatatccatctccctctggaccgcataatctgatagctggaatatctgttgtagcgtttgtaatttctggcaatgtcgtttcgatagcgttaccactatcggcgaatgatctgattatcatagcagcgaacaacaacatcagataatttatcaacatttttgatggattctgtgtttatgctgtttctcagtgtgtgtttatgacaagattgggaattttatattattaattcagtaatataaactaataatatattgttaattgtgtaaataatataaaaataacaatacaatattgaatgtgttgctgttaaaaatgtatgtgttaatataatagaataaaataaatgagtatgatcattttagataacgattgattttatcattaccgcttcattcttatattctttgcttacggaacctatatttagaaacatctactaacaattttttatgcttgcattattaatggtatgtaatatgattgattgtgtacgcaataccaatttgttaagtatgaatacggggtacaaacataaattgaaatttaacattatttatttatgatatatatcgttatcgttaggtctataccatggatatctttaaagaactaatcttaaaacaccctgatgaaaatgttttgatttctccagtttccattttatctactttatctattctaaatcatggagcagctggttctacagctgaacaactatcaaaatatatagagaatatgaatgagaatacacccgatgacaataatgatgacatggaggtagatattccgtattgtgcgacactagctaccgcaaataaaatatacggtagcgatagtatcgagttccacgcctccttcctacaaaaaataaaagacgattttcaaactgtaaactttaataatgctaaccaaacaaaggaactaatcaacgaatgggttaagacaatgacaaatggtaaaattaattccttattgactagtccgctatccattaatactcgtatgacagttgttagcgccgtccattttaaagcaatgtggaaatatccattttctaaacatcttacatatacagacaagttttatatttctaagaatatagttaccagcgttgatatgatggtgggtaccgagaataacttgcaatatgtacatattaatgaattattcggaggattctctattatcgatattccatacgagggaaactctagtatggtaattatactaccggacgacatagaaggtatatataacatagaaaaaaatataacagatgaaaaatttaaaaaatggtgtggtatgttatctactaaaagtatagacttgtatatgccaaagtttaaagtggaaatgacagaaccgtataatctggtaccgattttagaaaatttaggacttactaatatattcggatattatgcagattttagcaagatgtgtaatgaaactatcactgtagaaaaatttctacatacgacgtttatagatgttaatgaggagtatacagaagcatcggccgttacaggagtatttacgattaacttttcgatggtatatcgtacgaaggtctacataaaccatccattcatgtacatgattaaagacaccacaggacgtatactttttatagggaaatactgctatccgcaataaatataaacaaatagacttttataaagagtcttcaacgataagtatatcgacatactacttatgctgcgaaagattctgaacgagaacgactatctcaccctcttggatcatatccgcactgctaaatactaaatctccactacactttttatcatcttatgaggaatgattgccttcgtgaaataggaataattagcaccagaatagctatggattattgtggtagagagtgcactattctatgtcgtctactggatgaagatgtgacgtacaaaaaaataaaactagaaattgaaacgtgtcacaacttatcaaaacatatagatagacgaggaaacaatgcgctacattgttacgtctccaataaatgcgatacagacattaagattgttctctcgcggagtcgagagactttgtagaaacaacgaaggattaactccgctaggagtatacagtaagcatagatacgtaaaatctcagattgtgcatctactgatatccagctattcaaattcctctaacgaactcaagtcgaatataaatgatttcgatctgtattcggataatatcgacttacgtctgctaaaatacctaattgtggataaacggatacgtccgtccaagaatacgaattatgcaatcaatggtctcggattggtggatatatacgtaacgacgcctaatccgagaccagaagtattgctatggcttcttaaatcagaatgttacagcaccggttacgtatttcgtacctgtatgtacgacagtgatatgtgtaagaactctcttcattactatatatcgtctcatagagaatctcaatctctatccaaggatgtaattaaatgtttgatcgataacaatgtttccatccatggcagagacgaaggaggatctttacccatccaatactactggtctttctcaaccatagatatagagattgttaaattattattaataaaggatgtggacacgtgtagagtatacgacgtcagccctatattagaggcgtattatctaaacaagcgatttagagtaaccccatataatgtagacatggaaatcgttaatcttcttattgagagacgtcatactcttgtcgacgtaatgcgtagtattacttcgtacgattccagagaatataaccactacatcatcgataacattctaaagagatttagacaacaggatgaatccatcgtacaagccatactgataaactacttacattacggcgatatggtcgttcgatgcatgttagataacggacaacaactatcctctacacgactactttgttaataataatctcgtcgatgtaaacgtcgtaaggtttatcgtggaaaatatggacacgcggctgtaaatcacgtatcgaacaatggccgtctatgtatgtacggtctgatattatcgagatttaataattgcgggtatcactgttatgaaaccatactgatagatgtatttgatatactaagcaagtacatggatgatatagatatgatcgataactctactatattacgcggtcgatgtcaataatatacaatttgcaaagcggttattggaatatggagcgagtatcacgctcgataatcaatacggccatccagaaaagcagttacagaagagaaaacaaaacgaaatcgttgttctacaagatgtctctccctacgacgattactacgtaaaaaagatactagcctactgcctattaagggacgagtcattcgcggaactacatagtaaattctgtttaaacgaggactataaaagtgtatttatgaaaaatatatcattcgataagatagattccatcatcgtgacataagtcgcctcaaagagattcgaatctccgacaccgacctgtatacggtatcacagctatcttaaagccatacattcagacagtcacatttcatttcccatgtacgacgatctcatagaacagtgccatctatcgatggagcgtaaaagtaaactcgtcgacaaagcactcaataaattagagtctaccatcggtcaatctagactatcgtatttgcctccggaaattatgcgcaatatcatctaaacagtatgttgtacggaaagaaccattacaaatattatccatgatagaaagaaaatatctatatgattggagaagtaggaaacaggaacaagacaacgattactacattattaaatcatgaagtccgtattatactcgtatatattgtttctctcatgtataataataaacggaagagatatagcaccgcatgcaccatccgatggaaagtgtaaagacaacgaatacaaacgccataatttgtgtccgggaacatacgcttccagattatgcgatagcaagactaacacacgatgtacgccgtgtggttcgggtaccttcacatctcgcaataatcatttacccgcttgtctaagttgtaacggaagacgcgatcgtgtaacacgactcacaatagaatctgtgaatgctctcccggatattattgtcttctcaaaggatcatccggatgcaaggcatgtgtttcccaaacaaaatgtggaataggatacggagtatccggagacgtcatctgttctccgtgtggtctcggaacatattctcacaccgtctcttccgcagataaatgcgaacccgtacccagaaatacgtttaactatatcgatgtggaaattaacctgtatccagttaacgacacgtcgtgtactcggacgaccactaccggtctcagcgaatccatctcaacgtcggaactaactattactatgaatcataaagactgtaatcccgtatttcgtgatggatacttctccgttcttaataaggtagcgacttcaggtttctttacaggagaaaggtgtgcactctgaatttcgagattaaatgcaataacaaagattcttcctccaaacagttaacgaaagcaaagaatgatactatcatgccgcattcggagacagtaactctagtgggcgacatctatatactatatagtaataccaatactcaagactacgaaactgatacaatctcttatcatgtgggtaatgttctcgatgtcgatagccatatgcccggtagttgcgatatacataaactgatcactaattccaaacccacccactttttatagtaagtttttcacccataaataataaatacaataattaatttctcgtaaaagtagaaaatatattctaatttattgcacggtaaggaagtagaatcataaagaacagtactcaatcaatagcaattatgaaacaatatatcgtcctggcatgcatgtgcctggcggcagctgctatgcctgccagtcttcagcaatcatcctcatcctcctcctcgtgtacggaagaagaaaacaaacatcatatgggaatcgatgttattatcaaagtcacaaagcaagaccaaacaccgaccaatgataagatttgccaatccgtaacggaaattacagagtccgagtcagatccagatcccgaggtggaatcagaagatgattccacatcagtcgaggatgtagatcctcctaccacttattactccatcatcggtggaggtctgagaatgaactttggattcaccaaatgtcctcagattaaatccatctcagaatccgctgatggaaacacagtgaatgctagattgtccagcgtgtccccaggacaaggtaaggactctcccgcgatcactcatgaagaagctcttgctatgatcaaagactgtgaagtgtctatcgacatcagatgtagcgaagaagagaaagacagcgacatcaagacccatccagtactcgggtctaacatctctcataagaaagtgagttacgaagatatcatcggttcaacgatcgtcgatacaaaatgcgtcaagaatctagagtttagcgttcgtatcggagacatgtgcaaggaatcatctgaacttgaggtcaaggatggattcaagtatgtcgacggatcggcatctgaaggtgcaaccgatgatacttcactcatcgattcaacaaaactcaaagcgtgtgtctgaatcgataactctattcatctgaaattggatgagtagggttaatcgaacgattcaggcacaccacgaattaaaaaagtgtaccggacactatattccggtttgcaaaacaaaaatgttcttaactacattcacaaaaagttacctctcgcgacttcttctttttctgtctcaatagtgtgatacgattatgacactattcctattcctattcctatttcctttcagagtatcacaaaaatattaaacctctttctgatggtctcataaaaaaagttttacaaaaatatttttattctctttctctctttgatggtctcataaaaaaagttttacaaaaatatttttattctctttctctctttgatggtctcataaaaaaagttttacaaaaatatttttattctctttctctctttgatggtctcataaaaaaagttttacaaaaatatttttattctctttctctctttgatggtctcataaaaaaagttttacaaaaatatttttattctctttctctctttgatggtctcataaaaaaagttttacaaaaatatttttattctctttctctctttgatggtctcataaaaaaagttttacaaaaatatttttattctctttctctctttgatggtctcataaaaaaagttttacaaaaatatttttattctctttctctctttgatggtctcataaaaaaagttttacaaaaatatttttattctctttctctctttgatggtctcataaaaaaagttttacaaaaatatttttattctctttctctctttgatggtctcataaaaaaagttttacaaaaatatttttattctctttctctctttgatggtctcataaaaaaagttttacaaaaatatttttattctctttctctctttgatggtctcataaaaaagttttacaaaaatatttttattctctttctctctttgatggtctcataaaaaagttttacaaaaatatttttattctctttctctctttgatggtctcataaaaaaagttttacaaaaatatttttattctctttctctctttgatggtctcataa

SEQ ID NO: 212 - DNA, 198015 bp, Artificial Sequence
  GLV-1h458
ttatgagaccatcaaagagagaaagagaataaaaatatttttgtaaaactttttttatgagaccatcaaagagagaaagagaataaaaatatttttgtaaaacttttttatgagaccatcaaagagagaaagagaataaaaatatttttgtaaaacttttttatgagaccatcaaagagagaaagagaataaaaatatttttgtaaaactttttttatgagaccatcaaagagagaaagagaataaaaatatttttgtaaaactttttttatgagaccatcaaagagagaaagagaataaaaatatttttgtaaaactttttttatgagaccatcaaagagagaaagagaataaaaatatttttgtaaaactttttttatgagaccatcaaagagagaaagagaataaaaatatttttgtaaaactttttttatgagaccatcaaagagagaaagagaataaaaatatttttgtaaaactttttttatgagaccatcaaagagagaaagagaataaaaatatttttgtaaaactttttttatgagaccatcaaagagagaaagagaataaaaatatttttgtaaaactttttttatgagaccatcaaagagagaaagagaataaaaatatttttgtaaaactttttttatgagaccatcaaagagagaaagagaataaaaatatttttgtaaaactttttttatgagaccatcaaagagagaaagagaataaaaatatttttgtaaaactttttttatgagaccatcaaagagagaaagagaataaaaatatttttgtaaaactttttttatgagaccatcagaaagaggtttaatatttttgtgatactctgaaaggaaataggaataggaataggaatagtgtcataatcgtatcacactattgagacagaaaaagaagaagtcgcgagaggtaactttttgtgaatgtagttaagaacatttttgttttgcaaaccggaatatagtgtccggtacacttttttaattcgtggtgtgcctgaatcgttcgattaaccctactcatccaatttcagatgaatagagttatcgattcagacacacgctttgagttttgttgaatcgatgagtgaagtatcatcggttgcaccttcagatgccgatccgtcgacatacttgaatccatccttgacctcaagttcagatgattccttgcacatgtctccgatacgaacgctaaactctagattcttgacgcattttgtatcgacgatcgttgaaccgatgatatcttcgtaactcactttcttatgagagatgttagacccgagtactggatgggtcttgatgtcgctgtctttctcttcttcgctacatctgatgtcgatagacacttcacagtctttgatcatagcaagagcttcttcatgagtgatcgcgggagagtccttaccttgtcctggggacacgctggacaatctagcattcactgtgtttccatcagcggattctgagatggatttaatctgaggacatttggtgaatccaaagttcattctcagacctccaccgatgatggagtaataagtggtaggaggatctacatcctcgactgatgtggaatcatcttctgattccacctcgggatctggatctgactcggactctgtaatttccgttacggattggcaaatcttatcattggtcggtgtttggtcttgctttgtgactttgataataacatcgattcccatatgatgtttgttttcttcttccgtacacgaggaggaggatgaggatgattgctgaagactggcaggcatagcagctgccgccaggcacatgcatgccaggacgatatattgtttcataattgctattgattgagtactgttctttatgattctacttccttaccgtgcaataaattagaatatattttctacttttacgagaaattaattattgtatttattatttatgggtgaaaaacttactataaaaagtgggtgggtttggaattagtgatcagtttatgtatatcgcaactaccgggcatatggctatcgacatcgagaacattacccacatgataagagattgtatcagtttcgtagtcttgagtattggtattactatatagtatatagatgtcgcccactagagttactgtctccgaatgcggcatgatagtatcattctttgctttcgttaactgtttggaggaagaatctttgttattgcatttaatctcgaaattcagagtgcacacctttctcctgtaaagaaacctgaagtcgctaccttattaagaacggagaagtatccatcacgaaatacgggattacagtctttatgattcatagtaatagttagttccgacgttgagatggattcgctgagaccggtagtggtcgtccgagtacacgacgtgtcgttaactggatacaggttaatttccacatcgatatagttaaacgtatttctgggtacgggttcgcatttatctgcggaagagacggtgtgagaatatgttccgagaccacacggagaacagatgacgtctccggatactccgtatcctattccacattttgtttgggaaacacatgccttgcatccggatgatcctttgagaagacaataatatccgggagagcattcacagattctattgtgagtcgtgttacacgatcgcgtcttccgttacaacttagacaagcgggtaaatgattattgcgagatgtgaaggtacccgaaccacacggcgtacatcgtgtgttagtcttgctatcgcataatctggaagcgtatgttcccggacacaaattatggcgtttgtattcgttgtctttacactttccatcggatggtgcatgcggtgctatatctcttccgtttattattatacatgagagaaacaatatatacgagtataatacggacttcatgatttaataatgtagtaatcgttgtcttgttcctgtttcctacttctccaatcatatagatattttctttctatcatggataatatttgtaatggttctttccgtacaacatactgtttagatgatattgcgcataatttccggaggcaaatacgatagtctagattgaccgatggtagactctaatttattgagtgctttgtcgacgagtttacttttacgctccatcgatagatggcactgttctatgagatcgtcgtacatgggaaatgaaatgtgactgtctgaatgtatggctttaagatagctgtgataccgtatacaggtcggtgtcggagattcgaatctctttgaggcgacttatgtcacgatgatggaatctatcttatcgaatgatatatttttcataaatacacttttatagtcctcgtttaaacagaatttactatgtagttccgcgaatgactcgtcccttaataggcagtaggctagtatcttttttacgtagtaatcgtcgtagggagagacatcttgtagaacaacgatttcgttttgttttctcttctgtaactgcttttctggatggccgtattgattatcgagcgtgatactcgctccatattccaataaccgctttgcaaattgtatattattgacatcgaccgcgtaatatagtagagttatcgatcatatctatatcatccatgtacttgcttagtatatcaaatacatctatcagtatggtttcataacagtgatacccgcaattattaaatctcgataatatcagaccgtacatacatagacggccattgttcgatacgtgatttacagccgcgtgtccatattttccacgataaaccttacgacgtttacatcgacgagattattattaacaaagtagtcgtgtagaggatagttgttgtccgttatctaacatgcatcgaacgaccatatcgccgtaatgtaagtagtttatcagtatggcttgtacgatggattcatcctgttgtctaaatctctttagaatgttatcgatgatgtagtggttatattctctggaatcgtacgaagtaatactacgcattacgtcgacaagagtatgacgtctctcaataagaagattaacgatttccatgtctacattatatggggttactctaaatcgcttgtttagataatacgcctctaatatagggctgacgtcgtatactctacacgtgtccacatcctttattaataataatttaacaatctctatatctatggttgagaaagaccagtagtattggatgggtaaagatcctccttcgtctctgccatggatggaaacattgttatcgatcaaacatttaattacatccttggatagagattgagattctctatgagacgatatatagtaatgaagagagttcttacacatatcactgtcgtacatacaggtacgaaatacgtaaccggtgctgtaacattctgatttaagaagccatagcaatacttctggtctcggattaggcgtcgttacgtatatatccaccaatccgagaccattgattgcataattcgtattcttggacggacgtatccgtttatccacaattaggtattttagcagacgtaagtcgatattatccgaatacagatcgaaatcatttatattcgacttgagttcgttagaggaatttgaatagctggatatcagtagatgcacaatctgagattttacgtatctatgcttactgtatactcctagcggagttaatccttcgttgtttctacaaagtctctcgactccgcgagagaacaatcttaatgtctgtatcgcatttattggagacgtaacaatgtagcgcattgtttcctcgtctatctatatgttttgataagttgtgacacgtttcaatttctagttttatttttttgtacgtcacatcttcatccagtagacgacatagaatagtgcactctctaccacaataatccatagctattctggtgctaattattcctatttcacgaaggcaatcattcctcataagatgataaaaagtgtagtggagatttagtatttagcagtgcggatatgatccaagagggtgagatagtcgttctcgttcagaatctttcgcagcataagtagtatgtcgatatacttatcgttgaagactctttataaaagtctatttgtttatatttattgcggatagcagtatttccctataaaaagtatacgtcctgtggtgtctttaatcatgtacatgaatggatggtttatgtagaccttcgtacgatataccatcgaaaagttaatcgtaaatactcctgtaacggccgatgcttctgtatactcctcattaacatctataaacgtcgtatgtagaaatttttctacagtgatagtttcattacacatcttgctaaaatctgcataatatccgaatatattagtaagtcctaaattttctaaaatcggtaccagattatacggttctgtcatttccactttaaactttggcatatacaagtctatacttttagtagataacataccacaccattttttaaatttttcatctgttatatttttttctatgttatatataccttctatgtcgtccggtagtataattaccatactagagtttccctcgtatggaatatcgataatagagaatcctccgaataattcattaatatgtacatattgcaagttattctcggtacccaccatcatatcaacgctggtaactatattcttagaaatataaaacttgtctgtatatgtaagatgtttagaaaatggatatttccacattgctttaaaatggacggcgctaacaactgtcatacgagtattaatggatagcggactagtcaataaggaattaattttaccatttgtcattgtcttaacccattcgttgattagttcctttgtttggttagcattattaaagtttacagtttgaaaatcgtcttttattttttgtaggaaggaggcgtggaactcgatactatcgctaccgtatattttatttgcggtagctagtgtcgcacaatacggaatatctacctccatgtcatcattattgtcatcgggtgtattctcattcatattctctatatattttgatagttgttcagctgtagaaccagctgctccatgatttagaatagataaagtagataaaatggaaactggagaaatcaaaacattttcatcagggtgttttaagattagttctttaaagatatccatggtatagacctaacgataacgatatatatcataaataaataatgttaaatttcaatttatgtttgtaccccgtattcatacttaacaaattggtattgcgtacacaatcaatcatattacataccattaataatgcaagcataaaaaattgttagtagatgtttctaaatataggttccgtaagcaaagaatataagaatgaagcggtaatgataaaatcaatcgttatctaaaatgatcatactcatttattttattctattatattaacacatacatttttaacagcaacacattcaatattgtattgttatttttatattatttacacaattaacaatatattattagtttatattactgaattaataatataaaattcccaatcttgtcataaacacacactgagaaacagcataaacacagaatccatcaaaaatgttgataaattatctgatgttgttgttcgctgctatgataatcagatcattcgccgatagtggtaacgctatcgaaacgacattgccagaaattacaaacgctacaacagatattccagctatcagattatgcggtccagagggagatggatattgtttacacggtgactgtatccacgctagagatattgacggtatgtattgtagatgctctcatggttatacaggcattagatgtcagcatgtagtattagtagactatcaacgttcagaaaacccaaacactacaacgtcatatatcccatctcccggtattatgcttgtattagtaggcattattatgtgttgtctattatctgtttataggttcactcgacgaactaaactacctatacaagatatggttgtgccataatttttataaatttttttatgagtatttttacaaaaatgtataaagtgtatgtcttatgtatatttataaaaatgctaagtatgcgatgtatctatgttatttgtatttatctaaacaatacctctacctctagatattatacaaaaattttttatttcggcatattaaagtaaaatctagttaccttgaaaatgaatacagtgggtggttccgtatcaccagtaagaacataatagtcaaatacagtatccgattgagattttgcatacaatactagtctagaaagaaatttgtaatcatcttctgtgacgggagtccatatatctgtatcatcgtctagtttatcagtgtcccatgctatattcctgttatcatcattagttaatgaaaataactctcgtgcttcagaaaagtcaaatattgtatccatacatacatctccaaaactatcgcttatacgtttatctttaacgatacctatacctagatggttatttactaacagacattttccagatctattgactataactcctatagtttccacatcaaccaagtaatgatcatctattgttatataacaataacataactcttttccatttttatcagtatgtatatctatatcaacgtcgtcgttgtagtgaatagtagtcattgatctattatatgaaacggatatgtctagaacggcaattgttttacgtccagttaacactttcgttgatttaaagtctagagtctttgcaaacataatatccttatccgactttatatttcctgtagggtggtataattttattttgcctccacatatcggtgtttccaaatatattactagacaatattccatatagttattagttaagggtacccaattagaacacgtacgcttattatcatcatttggatcgtatttcataaaagttattgtgttatcgatgtcaacacattctacattttttaatcgtctatatagtatttttctgatattttctataatatcagaattgtcttccatcggaagttgtatactatcggaatcagttacatgtttaaataattctctgatgtcattccttatacaatcaaattcattattaaacagtttaatagtctgtagacctttatcgtcgtaaatatccattgtcttattagttacgcttatttttatgtgtttttacgttgctttattatattttataagaatgattgtttgacgaatcacgagaactattaagacacattattaggtatatattataaaaaagtttttgattacgatgttataagaggaaagaggacacattaacatcatacatcaattaactacattcttataacatcgtaatcaaaagaattgcaattttgatgtataacaactgtcaatgggttatggaattgtatattacatattatacggtatgttggtaacgacaaataccggtcggtaattgtctgccggtgtaatagaattatatatatctatctattacaccggccttgtatacataataataagttgtggtagtatgatctccatatttataatttaggactttgtattcagtatttttggaatcataaaaaataaaaaaaagttttactaatttaaaatttaaaaagtatttacatttttttcactgtttagtcgcggatatggaattcgatcctgccaaaatcaatacatcatctatagatcatgtaacaatattacaatacatagatgaaccaaatgatataagactaacagtatgcattatccgaaatattatatcaatatcacaaaaataaatacacatttggctaatcaatttcgggcttggaaaaaacgtatcgccggaagggactatatgactaacttatctagagatacaggaatacaacaatcaaaacttactgaaactatacgtaactgtcaaaaaaatagaaacatatatggtctatatatacactacaatttagttattaattggataaccgatgtgattatcaatcaatattaagagggttggtaaattggtacatagctaataatacctatactccaaatacacccaataatacaacaaccatttctgagttggatatcatcaaaatactaaataaatacgaggacgtgtatagagtaagtaaagaaaaagaatgtggaatttgctatgaagttgtttactcaaaacgatagatactttggtttattggattcgtgtactcatatattttgcataacatgcatcaatatatggcatagaacacgaagagaaaccggtgcgtcggataattgtcctatatgccgtacccgttttagaaacataacaatgagcaagttctataagctagttaactaataaataaaaagtttaatttgttgacgacgtatgtcgttattttttctcgtataaaagattaatttgattctaatataatctttagtattggataaatatcaattcaaattaattccattagattatatcataaataaaaatagtagcacacaactacttcagcaaacattctttttataaatgccatctagcgtagcgaggacacaagtgaacctataattatcaaatttattagtatcagtcacatgaaggactttacgtagagtgacgattccactatctgtggtacgaacggtttcatcttctttgatgccatcacccagatgttctataaacttggtatcctcgtccgatttcatatcctttgccaaccaatacatatagctaaactcaggcatatgttccacacatcctgaacaatgaaattctccagaagatgttacaatgtctagatttggacatttggtttcaaccgcgttaacatatgagtgaacacacccatacatgaaagcgatgagaaataggattctcatcttgccaaaatatcactagaaaaaatttatttatcagttttaaaggtataaaaaatacttattgttgctcgaatattttgtatttgatggtatacggaagattagaaatgtaggtattatcatcaactgattctatggttttatgtattctatcatgtttcactattgcgttggaaataatatcatatgcttccacatatattttattttgttttaactcataatactcacgtaattctggattattggcatatctatgaataattttagctccatgatcagtaaatattaatgagaacatagtattaccacctaccattatttttttcatctcattcaattcttaattgcaaagatctatataatcattatagcgttgacttatggactctggaatcttagacgatgtacagtcatctataatcatggcatatttaatacattgttttatagcatagtcgttatctacgatgttagatatttctctcaatgaatcaatcacacaatctaatgtaggtttatgacataatagcattttcagcagttcaatgtttttagattcgttgatggcaatggctatacatgtatatccgttatttgatctaatgttgacatctgaaccggattctagcagtaaagatactagagattgtttattatatctaacagccttgtgaagaagtgtttctcctcgtttgtcaatcatgttaatgtctttaagataaggtaggcaaatgtttatagtactaagaattgggcaagcataagacatgtcacaaagacccttttttgtatgtataagtgtaaaaattataacatccatagttggatttacataggtgtccaatcgggatctctccatcatcgagataattgatggcatctcccttccttttttagtagatatttcatcgtgtaagaatcaatattaatatttctaaagtatccgtgtatagcctctttatttaccacagctccatattccactagagggatatcgccgaatgtcatatactcaattagtatatgttggaggacatccgagttcattgttttcaatatcaaagagatggtttccttatcatttctccatagtggtacaatactacacattattccgtgcggctttccattttccaaaaacaatttgaccaaatctaaatctacatctttattgtatctataatcactatttagataatcagccataattcctcgagtgcaacatgttagatcgtctatatatgaataagcagtgttatctattcctttcattaacaatttaacgatgtctatatctatatgagatgacttaatataatattgaagagctgtacaatagtttttatctataaaagacggcttgattccgtgattaattagacatttaacaacttccggacgcacatatgctctcgtatccgactctgaatacagatgagagatgatatacagatgcaatacggtaccgcaatttcgtagttgataatcatcatacgcgtatcagtactcgtcctcataaagaacactgcagccattttctatgaacaaatcaataattttagaaacaggatcattgtcattacataattttctataactgaacgatggttttcacatttaacactcaagtcaaatccatgttctaccaacacctttatcaagtcaacgtctacatttttggatttcatatagctgaatatattaaagttatttatgttgctaaatccagtggcttctagtagagccatcgctatatccttattaactttaacatgtctactatttgtgtattcttctaatggggtaagctgtctccaatttttgcgtaatggattagtgccactgtctagtagtagtttgacgacctcgacattattacaatgctcattaaaaaggtatgcgtgtaaagcattattcttgaattggttcctggtatcattaggatctctgtctttcaacatctgtttaagttcatcaagagccacctcctcattttccaaatagtcaaacattttgactgaatgagctactgtgaactctatacacccacacaactaatgtcattaaatatcatgtcaaaaacttgtacaattattaataaaaataatttagtgtttaaattttaccagttccagattttacacctccgttaatacctccattaaccccactggacgatcctcctccccacattccaccgccaccagatgtataagttttagatcctttattactaccatcatgtccatggataaagacactccacatgccgccactaccccctttagaagacatattaataagacttaaggacaagtttaacaataaaattaatcacgagtaccctactaccaacctacactattatatgattatagtttctatttttacagtaccttgactaaagtttctagtcacaagagcaatactaccaacctacactattatatgattatagtttctatttttataggaacgcgtacgagaaaatcaaatgtctaatttctaacggtagtgttgataaacgattgttatccgcggatacctcctctatcatgtcgtctattttcttactttgttctattaacttattagcattatatattatttgattataaaacttatattgcttattagcccaatctgtaaatatcggattattaacatatcgtttctttgtaggtttatttaacatgtacatcactgtaagcatgtccttaccatttattttaatttgacgcatatccgcaatttctttttcgcagtcggttataaattctatatatgatggatacatgctacatgtgtacttataatcgactaatatgaagtacttgatacatattttcagtaacgatttattattaccacctatgaataagtacctgtgatcgtctaggtaatcaactgttttcttaatacattcgatggttggtaatttactcagaataatttccaatatcttaatatataattctgctatttctgggatatatttatctgccagtataacacaaatagtaatacatgtaaacccatattttgttattatattaatgtctgcgccattatctattaaccattctactaggctgacactatgcgactcaatacaatgataaagtatactacatccatgtttatctattttgtttatatcatcaatatacggcttacaaagttttagtatcgataacacatccaactcacgcatagagaaggtagggaataatggcataatatttattaggttatcatcattgtcattatctacaactaagtttccattttttaaaatatactcgacaactttaggatctctattgccaaatttttgaaaatatttatttatatgcttaaatctatataatgtagctccttcatcaatcatacatttaataacattgatgtatactgtatgataagatacatattctaacaatagatcttgtatagaatctgtatatcttttaagaattgtggatattaggatattattacataaactattacacaattctaaaatataaaacgtatcacggtcgaataatagttgatcaactatataattatcgattttgtgatttttcttcctaaactgtttacgtaaatagttagatagaatattcattagttcatgaccactatagttactatcgaataacgcgtcaaatatttcccgtttaatatcgcatttgtcaagataataatagagtgtggtatgttcacgataagtataataacgcatctctttttcgtgtgaaattaaatagtttattacgtccaaagatgtagcataaccatcttgtgacctagtaataatataataatagagaactgttttacccattctatcatcataatcagtggtgtagtcgtaatcgtaatcgtctaattcatcatcccaattataatattcaccagcacgtctaatctgttctattttgatcttgtatccatactgtatgttgctacatgtaggtattcctttatccaataatagtttaaacacatctacattgggatttgatgttgtagcgtatttttctacaatattaataccatttttgatactatttatttctatacctttcgaaattagtaatttcaataagtctatattgatgttatcagaacatagatattcgaatatatcaaaatcattgatatttttatagtcgactgacgacaataacaaaatcacaacatcgtttttgatattattatttttcttggtaacgtatgcctttaatggagtttcaccatcatactcatataatggatttgcaccactttctatcaatgattgtgcactgctggcatcgatgttaaatgttttacaactatcatagagtatcttatcgttaaccatgattggttgttgatgctatcgcattttttggtttctttcatttcagttatgtatggatttagcacgtttgggaagcatgagctcatatgatttcagtactgtagtgtcagtactattagtttcaataagatcaatctctagatctatagaatcaaaacacgataggtcagaagataatgaatatctgtaggcttcttgttgtactgtaacttctggttttgttagatggttgcatcgtgctttaacgtcaatggtacaaattttatcctcgctttgtgtatcatattcgtccctactataaaattgtatattcagattatcatgcgatgtgtatacgctaacggtatcaataaacggagcacaccatttagtcataaccgtaatccaaaaatttttaaagtatatcttaacgaaagaagttgtgtcattgtctacggtgtatggtactagatcctcataagtgtatatatctagagtaatgtttaatttattaaatggttgataatatggatcctcgtgacaatttccgaagatggaaataagacataaacacgcaataaatctaattgcggacatggttactccttaaaaaaatacgaataatcaccttggctatttagtaagtgtcatttaacactatactcatattaatccatggactcataatctctatacgggattaacggatgttctatatacggggatgagtagttctcttctttaactttatactttttactaatcatatttagactgatgtatgggtaatagtgtttgaagagctcgttctcatcatcagaataaatcaatatctctgtttttttgttatacagatgtattacagcctcatatattacgtaatagaacgtgtcatctaccttattaactttcaccgcatagttgtttgcaaatacggttaatcctttgacctcgtcgatttccgaccaatctgggcgtataatgaatctaaactttaattgcttgtaatcattcgaaataatttttagtttgcatccgtagttatcccctttatgtaactgtaaatttctcaacgcgatatctccattaataatgatgtcgaattcgtgctgtatacccatactgaatggatgaacgaataccgacggcgttaatagtaatttactttttcatctttacatattgggtactagttttactatcataagtttataaattccacaagctactatggaataagccaaccatcttagtataccacacatgtcttaaagtttattaattaattacatgttgttttatatatatcgctacgaatttaaagagaaattagtttaggaagaaaaattatctatctacatcatcacgtctctgtattctacgatagagtgctactttaagatgcgacagatccgtgtcatcaaatatatactccattaaaatgattattccggcagcgaacttgatattggatatatcacaacctttgttaatatctacgacaatagacagcagtcccatggttccataaacagtgagtttatctttctttgaagagatattttgtagagatcttataaaactgtcgaatgacatcgcatttatatctttagctaaatcgtatatgttaccatcgtaatatctaaccgcgtctatcttaaacgtttccatcgctttaaagacgtttccgatagatggtctcatttcatcagtcatactgagccaacaaatataatcgtgtataacatctttgatagaatcagactctaaagaaaacgaatcggctttattatacgcattcatgataaacttaatgaaaaatgtttttcgttgtttaagttggatgaatagtatgtcttaataattgttattatttcattaattaatatttagtaacgagtacactctataaaaacgagaatgacataactaatcataactagttatcaaagtgtctaggacgcgtaattttcatatggtatagatcctgtaagcattgtctgtattctggagctattttctctatcgcattagtgagttcagaatatgttataaatttaaatcgaataacgaacataactttagtaaagtcgtctatattaactcttttattttctagccatcgtaataccatgtttaagatagtatattctctagttactacgatctcatcgttgtctagaatatcacatactgaatctacatccaattttagaaattggtctgtgttacatatctcttctatattattgttgatgtattgtcgtagaaaactattacgtagaccattttctttataaaacgaatatatagtactccaattatctttaccgatatatttgcacacataatccattctctcaatcactacatctttaagattttcgttgttaagatatttggctaaactatataattctattagatcatcaacagaatcagtatatatttttctagatccaaagacgaactctttggcgtcctctataatattcccagaaaagatattttcgtgttttagtttatcgagatctgatctgttcatatacgccatgattgtacggtacgttatgataaccgcataaaataaaaatccattttcatttttaaccaatactattcataattgagattgatgtaatactttgttactttgaacgtaaagacagtacacggatccgtatctccaacaagcacgtagtaatcaaatttggtgttgttaaacttcgcaatattcatcaatttagatagaaacttatactcatcatctgttttaggaatccatgtattattaccactttccaacttatcattatcccaggctatgtttcgtccatcatcgttgcgcagagtgaataattcttttgtattcggtagttcaaatatatgatccatgcatagatcggcaaagctattgtagatgtgatttttcctaaatctaatataaaactcgtttactagcaaacactttcctgatttatcgaccaagacacatatggtttctaaatctatcaagtggtggggatccatagttatgacgcagtaacatatattattacattcttgactgtcgctaatatctaaatatttattgttatcgtattggattctgcatatagatggcttgtatgtcaaagatatagaacacataaccaatttatagtcgcgctttacattctcgaatctaaagttaagagatttagaaaacattatatcctcggatgatgttatcactgtttctggagtaggatatattaaagtctttacagatttcgtccgattcaaataaatcactaaataatatcccacattatcatctgttagagtagtatcattaaatctattatattttatgaaagatatatcactgctcacctctatatttcgtacatttttaaactgtttgtataatatctctctgatacaatcagatatatctattgtgtcggtagacgataccgttacatttgaattaatggtgttccattttacaacttttaacaagttgaccaattcatttctaatagtatcaaactctccatgattaaatattttaatagtatccattttatatcactacggacacaaagtagctgacataaaccattgtataatttttatgttttatgtttattagcgtacacattttggaagttccggcttccatgtatttcctggagagcaagtagatgatgaggaaccagatagtttatatccgtacttgcacttaaagtctacattgtcgttgtatgagtatgatcttttaaacccgctagacaagtatccgtttgatattgtaggatgtggacatttaacaatctgacacgtgggtggatcggaccattctcctcctgaacacaggacactagagttaccaatcaacgaatatccactattgcaactataagttacaacgctcccatcggtataaaaatcctcgtatccgttatgtcttccgttggatatagatggaggggattggcatttaacagattcacaaataggtgcctcgggattccataccatagatccagtagatcctaattcacaatacgatttagattcaccgatcaactgatatccgctattacaagagtacgttatactagagccaaagtctactccaccaatatcaagttggccattatcgatatctcgaggcgatgggcatctccgtttaatacattgattaaagagtgtccatccagtacctgtacatttagcatatataggtcccattttttgctttctgtatccaggtagacatagatattctatagtgtctcctatgttgtaattagcattagcatcagtctccacactattcttaaatttcatattaatgggtcgtgacggaatagtacagcatgatagaacgcatcctattcccaacaatgtcaggaacgtcacgctctccaccttcatatttatttatccgtaaaaatgttatcctggacatcgtacaaataataaaaagcccatatatgttcgctattgtagaaattgtttttcacagttgctcaaaaacgatggcagtgacttatgagttacgttacactttggagtctcatctttagtaaacatatcataatattcgatattacgagttgacatatcgaacaaattccaagtatttgattttggataatattcgtattttgcatctgctataattaagatataatcaccgcaagaacacacgaacatctttcctacatggttaaagtacatgtacaattctatccatttgtcttccttaactatatatttgtatagataattacgagtctcgtgagtaattccagtaattacatagatgtcgccgtcgtactctacagcataaactatactatgatgtctaggcatgggagacttttttatccaacgatttttagtgaaacattccacatcgtttaatactacatatttctcatacgtggtataaactccacccattacatatatatcatcgtttacgaataccgacgcgcctgaatatctaggagtaattaagtttggaagtcttatccatttcgaagtgccgtgtttcaaatattctgccacacccgttgaaatagaaaattctaatcctcctattacatataactttccatcgttaacacaagtactaacttctgattttaacgacgacatattagtaaccgttttccattttttcgttttaagatctacccgcgatacggaataaacatgtctattgttaatcatgccgccaataatgtatagacaattatgtaaaacatttgcattatagaattgtctatctgtattaccgactatcgtccaatattctgttctaggagagtaatgggttattgtggatatataatcagagtttttaatgactactatattatgttttataccatttcgtgtcactggctttgtagatttggatatagttaatcccaacaatgatatagcattgcgcatagtattagtcataaacttgggatgtaaaatgttgatgatatctacatcgtttggatttttatgtatccactttaataatatcatagctgtaacatcctcatgatttacgttaacgtcttcgtgggataagatagttgtcagttcatcctttgataattttccaaattctggatcggatgtcaccgcagtaatattgttgattatttctgacatcgacgcattatatagttttttaattccatatcttttagaaaagttaaacatccttatacaatttgtgaaattaatattatgaatcatagtttttacacatagatctactacaggcggaacatcaattattatggcagcaactagtatcatttctacattgtttatggtgatgtttatcttcttccagcgcatatagtctaatagcgattcaaacgcgtgatagtttataccattcaatataatcgcttcatcctttagatggtgatcctgaatgcgtttaaaaaaattatacggagacgccgtaataatttccttattcacttgtataatttccccattgatagaaaatattacgctttccattcttaaagtactataagtaattatagtataatgtaaacgtttatatattcaatatttttataaaaatcattttgacattaattcctttttaaatttccgtctatcatctatagaaacgtattctatgaatttataaaatgcttttacgtgtcctatcgtaggcgatagaaccgctaaaaagcctatcgaatttctacaaaagaatctgttatatggtatagggagagtataaaacattaaatgtccgtacttattaaagtattcagtagccaatcctaactctttcgaatacttattaatggctcttgttctgtacgaatctatttttttgaacaacggacctagtggtatatcttgttctatgtatctaaaataatgtctgactagatccgttagtttaatatccgcagtcatcttgtctagaatggcaaatctaactgcgggtttaggctttagtttagtttctatatctacatctatgtctttatctaacaccaaaaatataatagctaatattttattacaatcatccggatattcttctacgatctcactaactaatgtttctttggttatactagtatagtcactatcggacaaataaagaaaatcagatgatcgatgaataatacatttaaattcatcatctgtaagatttttgagatgtctcattagaatattattagggttagtactcattatcattcggcagctattacttattttattatttttcaccatatagatcaatcattagatcatcaaaatatgtttcaatcatcctaaagagtatggtgaatgactcttcccatctaatttctgaacgttcaccaatgtctctagccactttggcactaatagcgatcattcgcttagcgtcttctatattattaactggttgatttaatctatctagcaatggaccgtcggacagcgtcattctcatgttcttaatcaatgtacatacatcgccgtcatctaccaattcatccaacaacataagctttttaaaatcatcattataataggtttgatcgttgtcatttctccaaagaatatatctaataagtagagtcctcatgcttagttaacaactattttttatgttaaatcaattagtacaccgctatgtttaatacttattcatattttagtttttaggattgagaatcaatacaaaaattaatgcatcattaattttagaaatacttagtttccacgtagtcaatgaaacatttgaactcatcgtacaggacgttctcgtacaggacgtaactataaaccggtttatatttgttcaagatagatacaaatccgataactttttttacgaattctacgggatccactttaaaagtgtcataccgggttctttttatttttttaaacagatcaatggtgtgatgttgattaggtcttttacgaatttgatatagaatagcgtttacatattctccataatggtcaatcgccatttgttcgtatgtcataaattctttaattatatgacactgtgtattatttagttcatccttgttcattgttaggaatctatccaaaatggcaattatactagaactataggtgcgttgtatacacatattgatgtgtctgtttatacaatccatgatatttggatccatgctactaccttcgggtaaaattgtagcatcatataccatttctagtactttaggttcattattatccattgcagaggacgtcatgatcgaatcataaaaaaatatattatttttatgttattttgttaaaaataatcatcgaatacttcgtaagatactccttcatgaacataatcagttacaaaacgtttatatgaagtaaagtatctacgatttttacaaaagtccggatgcataagtacaaagtacgcgataaacggaataataatagatttatctagtctatctttttctatagctttcatagttagatacatggtctcagaagtaggattatgtaacatcagcttcgataaaatgactgggttatttagtcttacacattcgctcatacatgtatgaccgttaactacagagtctacactaaaatgattgaacaatagatagtctaccattgtttcgtattcagatagtacagcgtagtacatggcatcttcacaaattatatcattgtctaatagatatttgacgcatcttatggatcccacttcaacagccatcttaaaatcatattgctttcctttatcattaataatttctagaacatcatctctatcataaaagatacaaatattaactgtttgatccgtaataacattgctagtcaatagcaatttgttaataagatgcgctgggctcaatgtcttaataagaagtgtaagaggactatctccgaatttgttttgtttattaacatccgttgatggaagtaaaagatctataatgtctacattcttgactgttttagagcatacaatatggagaggtgtatttccatcatgatctggttttgagggactaattcctagtttcatcatccatgagattgtagaagcttttggattgtctgacataagatgtctatgaatatgatttttgccaaatttatccactatcctggcttcgaatccgatggacattatttttttaaacactctttctgaaggatctgtacacgccaacaacggaccacatccttcttcatcaaccgagttgttaatcttggctccatactgtaccaataaatttattctctctatgacttcatcatctgttcccgagagataatatagaggtgttttatgctgtttatcacacgcgtttggatctgcgccgtgcgtcagcagcatcgcgactattctattattattaattttagaagctatatgcaatggataatttccatcatcatccgtctcatttggagagtatcctctatgaagaagttcttcgacaaatcgttcatctagtcctttaattccacaatacgcatgtagaatgtgataattatttccagaaggttcgatagcttgtagcatattcctaaatacatctaaatttttactattatatttggcataaagagatagataatactcggccgacataatgttgtccattgtagtataaaaattaatatttctatttctatttctgtatatttgcaacaatttactctctataacaaatatcataacttagtttttttatgtcaagaaggcactggtttagttcatctataaatgtcacgccataactaccacgcatgccatactcagaattatgataaagatatttatccttggggtgtaggtaatggggattaatctttgttggatcagtctctaagttaacacatgtcacacatgatccatttatagttatatcacacgatgatgatttatgaattgattccggaagatcgctatcgtattttgtggttccacaattcatttccatacatgttattgtcacactaatattatgatgaactttatctagccgctgagtggtaaacaacagaacagatagtttattatctttaccaacaccctcagccgctgccacaaatctctgatccgtatccatgatggtcatgtttatttctagtccgtatccagtcaacactatgttagcatttctgtcgatatagctttcactcatatgacactcaccaataatagtagaattaatgtcgtaatttacaccaatagtgagttcggcggcaaagtaccaataccggtaatcttgtcgaggaggacatatagtattcttgtattctaccgaatacccgagagatgcgatacaaaagagcaagactaatttgtaaaccatcttactcaaaatatgtaacaatagtacgatgcaatgagtaagacaataggaaatctatcttatatacacataattattctatcaattttaccaattagttagtgtaatgttaacaaaaatgtgggagaatctaattagtttttctttacacaattgacgtacatgagtctgagttccttgtttttgctaattatttcatccaatttattattcttgacgatatcgagatcttttgtataggagtcaaacttgtattcaacatgcttttctataatcattttagctatttcggcatcatccaatagtacattttccagattagcagaatagatattaatgtcgtatttgaacagagcctgtaacatctcaatgtctttattatctatagccaatttaatgtccggaatgaagagaagggaattattggtgtttgtcgacgtcatatagtcgagcaagagaatcatcatatccacgtgtccattttttatagtgatgtgaatacaactaaggagaatagccagatcaaaagtagatggtatctctgaaagaaagtaggaaacaatacttacatcattaagcatgacggcatgataaaatgaagttttccatccagttttcccatagaacatcagtctccaatttttcttaacaaacagttttaccgtttgcatgttaccactatcaaccgcataatacaatgcggtgtttcccttgtcatcaaattgtgaatcatccagtccactgaatagcaaaatctttactattttggtatcttccaatgtggctgcctgatgtaatggaaattcattctctagaagatttttcaatgctccagcgttcaacaacgtacatactagacgcacgttattatcagctattgcataatacaaggcactatgtccatggacatccgccttaaatgtatctttactagagagaaagcttttcagctgcttagacttccaagtattaattcgtgacagatccatgtctgaaacgagacgctaattagtgtatattttttcattttttataattttgtcatattgcaccagaattaataatatctttaatagatctgattagtagatacatggctatcgcaaaacaacatatacacatttaataaaaataatatttattaagaaaattcagatttcacgtacccatcaatataaataaaataatgattccttacaccgtacccatattaaggagattccaccttacccataaacaatataaatccagtaatatcatgtctgatgatgaacacaaatggtgtattaaattccagtttttcaggagatgatctcgccgtagctaccataatagtagatgcctctgctacagttccttgttcgtcgacatctatctttgcattctgaaacattttataaatatataatgggtccctagtcatatgtttaaacgacgcattatctggattaaacatactaggagccatcatttcggctatcgacttaatatccctcttattttcgatagaaaatttagggagtttaagattgtacactttattccctaattgagacgaccaatagtctaattttgcagccgtgatagaatctgtgaaatgggtcatattatcacctattgccaggtacatactaatattagcatccttatacggaaggcgtaccatgtcatattctttgtcatcgattgtgattgtatttccttgcaatttagtaactacgttcatcatgggaaccgttttcgtaccgtacttattagtaaaactagcattgcgtgttttagtgatatcaaacggatattgccatatacctttaaaatatatagtattaatgattgcccatagagtattattgtcgagcatattagaatctactacattagacataccggatctacgttctactatagaattaattttattaaccgcatctcgtctaaagtttaatctatataggccgaatctatgatattgttgataatacgacggtttaatgcacacagtattatctacgaaactttgataagttagatcagtgtacgtatatttagatgttttcagcttagctaatcctgatattaattctgtaaatgctggacccagatctctttttctcaaatccatagtcttcaataattctattctagtattacctgatgcaggcaatagcgacataaacatagaaaacgaataaccaaacggtgagaagacaatattatcatcttgaatatttttatacgctactataccggcattggtaaatccttgtagacgataggcggacgctgaacacgctaacgatagtatcaataacgcaatcatgattttatggtattaataattaaccttatttttatgttcggtataaaaaaattattgatgtctacacatccttttgtaattgacatctatatatccttttgtataatcaactctaatcactttaacttttacagttttccctaccagtttatccctatattcaacatatctatccatatgcatcttaacactctctgccaagatagcttcagagtgaggatagtcaaaaagataaatatatagagcataatcattctcgtatactctgccctttattacatcacccgcattgggcaacgaataacaaaatgcaagcatcttgttaacgggctcgtaaattgggataaaaattatgtttttattgtcttatatctattttattcaagagaatattcaggaatttctttttccggttgtatctcgtcgcagtatatatcatttgtacattgtttcatattttttaatagtttacaccttttagtaggactagtatcgtacaattcatagctgtattttgaattccaatcacgcataaaaatatcttccaattgttgacgaagacctaatccatcatccggtgtaatattaatagatgctccacatgtatccgtaaagtaatttcctgtccaatttgaggtacctatataggccgttttatcggttaccatatatttggcatggtttaccctagaatacggaatgggaggatcagcatctggtacaataaatagctttacttctatatttatgtttttagattttagcatagcgatagatcttaaaaagtttctcatgataaacgaagatcgttgccagcaactaatcaatagcttaacggatacttgtctgtctatagcggatcttcttaattcatcttctatataaggccaaaacaaaattttacccgccttcgaataaataatagggataaagttcataacagatacataaacgaatttactcgcatttctaatacatgacaataaagcggttaaatcattggttctttccatagtacatagttgttgcggtgcagaagcaataaatacagagtgtggaacgccgcttacgttaatactaagaggatgatctgtattataatacgacggataaaagtttttccaattatatggtagattgttaactccaagataccagtatacctcaaaaatttgagtgagatccgctgccaagttcctattattgaagatcgcaatacccaattccttgacctgagttagtgatctccaatccatgttagcgcttcctaaataaatatgtgtattatcagatatccaaaattttgtatgaagaactcctcctaggatatttgtaatatctatgtatcgtacttcaactccggccatttgtagtctttcaacatcctttaatggtttgttagatttattaacggctactctaactcgtactcctcttttgggtaattgtacaatctcgtttaatattatcgtgccgaaattcgtacccacttcatccgataaactccaataaaaagatgatatatctagtgtttttgtggtattggatagaatttccctccacatgttaaatgtagacaaatatactttatcaaattgcatacctataggaatagtttctgtaatcactgcgattgtattatccggattcattttatttgttaaaagaataatcctatatcacttcactctattaaaaatccaagtttctatttctttcatgactgattttttaacttcatccgtttccttatgaagatgatgtttggcaccttcataaatttttatttctctattacaatttgcatgttgcatgaaataatatgcacctaaaacatcgctaatcttattgtttgttccctggagtatgagagtcggggggtgttaatcttggaaattatttttctaaccttgttggtagccttcaagacctgactagcaaatccagccttaattttttcatgattgactaatgggtcgtattggtatttataaactttatccatatctctagatactgattctggacatagctttccgactggcgcatttggtgtgatggttcccataagtttggcagctagcagattcagtcttgaaacagcatctgcattaactagaggagacattagaatcattgctgtaaacaagtttggattatcgtaagaggctagctcccatggaatgacccaataagtagatttaatagttaccacgtgctgtaccaaagtcatcaatcatcattttttcaccattacttcttccatgtccaatatgatcatgtgagaatactaaaattcctaacgatgatatgttttcagctagttcgtcataacgtccagaatgtttaccagctccatgacttatgaatactaatgccttaggatatgtaataggtttccaatatttacaatatatgtaatcattgtccagattgaacatacagtttgcactcatgattcacgttatataactatcaatattaacagttcgtttgatgatcatattatttttatgttttattgataattgtaaaaacatacaattaaatcaatatagaggaaggagacggctactgtcttttgtaagatagtcatggcgactaaattagattatgaggatgctgttttttactttgtggatgatgataaaatatgtagtcgcgactccatcatcgatctaatagatgaatatattacgtggagaaatcatgttatagtgtttaacaaagatattaccagttgtggaagactgtacaaggaattgatgaagttcgatgatgtcgctatacggtactatggtattgataaaattaatgagattgtcgaagctatgagcgaaggagaccactacatcaattttacaaaagtccatgatcaggaaagtttattcgctaccataggaatatgtgctaaaatcactgaacattggggatacaaaaagatttcagaatctagattccaatcattgggaaacattacagatttgatgaccgacgataatataaacatcttgatactttttctagaaaaaaaattgaattgatgatataggggtcttcataacgcataattattacgttagcattctatatccgtgttaaaaaaaattatcctatcatgtatttgagagttttatatgtagcaaacatgatagctgtgatgccaataagctttagatattcacgcgtgctagtgttagggatggtattatctggtggtgaaatgtccgttatataatctacaaaacaatcatcgcatatagtatgcgatagtagagtaaacatttttatagtttttactggattcatacatcgtctacccaattcggttataaatgaaattgtcgccaatcttacacccaaccccttgttatccattagcatagtattaacttcgttatttatgtcataaactgtaaatgattttgtagatgccatatcatacatgatattcatgtccctattataatcattactaactttatcacaatatatgttgataatatctatatatgatctagtctttgtgggcaactgtctatacaagtcgtctaaacgttgtttactcatatagtatcgaacagccatcattacatggtcccgttccgttgatagataatcgagtatgttagtggacttgtcaaatctatataccatattttctggaagtggatatacatagtcgtgatcaacattattgctagcctcatcttctatatcctgtactataccattatctatatcatctacataatctatgatattattacacataaacatcgacaacatactattgtttattatctaagtcctgttgatccaaacccttgatctcctctatttgtactatctagagattgtacttcttccagttctggataatatatacgttgatagattagctgagctattctatctccagtatttacattaaacgtacattttccattattaataagaatgactcctatgtttcccctataatcttcgtctattacaccacctcctatatcaatgccttttagtgacagaccagacctaggagctattctaccatagcagaacttaggcatggacatactaatatctgtcttaattaactgtctttctcctggagggatagtataatcgtaagcgctatacaaatcatatccggcagcacccggcgattgcctagtaggagatttagctctgttagtttccttaacaaatctaactggtgagttaatattcatgttgaacataaaactaatattttatttcaaaattatttaccatcccatatattccatgaataagtgtgatgattgtacacttctatagtatctatatacgatccacgataaaatcctcctatcaatagcagtttattatccactatgatcaattctggattatccctcggataaataggatcatctatcagagtccatgtattgctggattcacaataaaattccgcatttctaccaaccaagaataaccttctaccgaacactaacgcgcatgatttataatgaggataataagtggatggtccaaactgccactgatcatgattgggtagcaaatattctgtagttgtatcagtttcagaatgtcctcccattacgtatataacattgtttatggatgccactgctggattacatctaggtttcagaagactcggcatattaacccaagcagcatccccgtggaaccaacgctcaacagatgtgggatttggtagacctcctactacgtataatttattgttagcgggtatcccgctagcatacagtctggggctattcatcggaggaattggaatccaattgtttgatatataatttacagctatagcattgttatgtatttcattgttcatccatccaccgatgagatatactacttctccaacatgagtacttgtacacatatggaatatatctataatttgatccatgttcataggatactctatgaatggatacttgtatgatttgcgtggttgtttatcacaatgaaatattttggtacagtctagtatccattttacattatttatacctctgggagaaagataatttgacctgattacatttttgataaggagtagcagatttcctaatttatttcttcgcctcatataccacttaatgacaaaatcaactacataatcctcatctggaacatttagttcatcgctttctagaataagtttcatagatagataatcaaaattgtctatgatgtcatcttccagttccaaaaagtgtttggcaataaagtttttagtatgacataagagattggatagtccgtattctatacccatcatgtaacactcgacacaatattcctttctaaaatctcgtaagataaagtttatacaagtgtagatgataaattctacagaggttaatatagaagcacgtaataaattgacgacgttatgactatctatatatacctttccagtatatgagtaaataactatagaagttaaactgtgaatgtcaaggtctagacaaacccttgtaactggatctttatttttcgtgtatttttgacgtaaatgtgtgcgaaagtaaggagataactttttcaatatcgtagaattgactattatattgcctcctatggcatcaataattgttttgaatttcttagtcatagacaatgctaatatattcttacagtacacagtattgacaaatatcggcatttatgtttctttaaaagtcaacatctagagaaaaatgattatctttttgagacataactcccattttttggtattcacccacacgtttttcgaaaaaattagtttttccttccaatgatatattttccatgaaatcaaacggattggtaacattataaatttttttaaatcccaattcagaaatcaatctatccgcgacgaattctatatatgttttcatcatttcacaattcattcctataagtttaactggaagagccgcagtaagaaattcttgttcaatggatactgcatctgttataatagatctaacggtttcttcactcggtggatgcaataaatgtttaaacatcaaacatgcgaaatcgcagtgcagaccctcgtctctactaattagttcgttggaaaacgtgagtccgggcattaggccacgctttttaagccaaaatatggaagcgaatgatccagaaaagaaaattccttctactgcagcaaaggcaataagtctctctccataaccggcgctgtcatgtatccacttttgagcccaatcggccttcttttttacacaaggcatcgtttctatggcattaaagagatagtttttttcattactatctttaacataagtatcgatcaaaagactatacatttccgaatgaatgttttcaatggccatctgaaatccgtagaaacatctagcctcggtaatctgtacttctgtacaaaatcgttccgccaaattttcattcactattccgtcactggctgcaaaaaacgccaatacatgttttataaaatatttttcgtctggtgttagtttattccaatcattgatatctttagatatatctacttcttccactgtccaaaatgatgcctctgcctttttatacatgttccagatgtcatgatattggattgggaaaataacaaatctatttggatttggtgcaaggatgggttccataactaaattaacaataacaataaattttttttcagttatctatatgcctgtacttggattttttgtacatcgatatcgccgcaatcactacaataattacaagtattattgatagcattgttattagtactatcataattaaattatctacattcatgggtgctgaataatcgttattatcatcattatcattttgtaattgtgacatcatactagataaatcgtttgcgagattgttgtgggaagcgggcatggaggatgcattatcattattatttaacgccttccatttggattcacaaatgttacgcacattcaacattttatggaaactataattttgtgaaaacaaataacaagaaaactcgtcatcgttcaaatttttaacgatagtaaaccgattaaacgtcgagctaatttctaacgctagcgactctgttggatatgggtttccagatatatatcttttcagttcccctacgtatctataatcatctgtaggaaatggaagatatttccatttatctactgttcctaatatcatatgtggtggtgtagtagaaccattaagcgcgaaagatgttatttcgcatcgtattttaacttcgcaataatttctggttagataacgcactctaccagtcaagtcaatgatattagcctttacagatatattcatagtagtcgtaacgatgactccatcttttagatgcgatactcctttgtatgtaccagaatcttcgtacctcaaactcgatatatttaaacaagttaatgagatattaacgcgttttatgaatgatgatatataaccagaagttttatcctcggtggctagcgctataaccttatcattataataccaactagtgtgattaatatgtgacacgtcagtgtgggtacaaatatgtacattatcgtctacgtcgtattcgatacatccgcatacagccaacaaatataaaatgacaaatactctaacgccgttcgtacccatcttgatgcggtttaataaatgttttgatttcaatttattgtaaaaaaagattcggttttatactgttcgatattctcattgcttatattttcatctatcatctccacacagtcaaatccgtggttagcatgcacctcatcaaccggtaaaagactatcggactcttctatcattataactctagaatatttaatttggtcattattaatcaagtcaattatcttatttttaacaaacgtgagtattttactcattttttataaaaacttttagaaatatacagactctatcgtgtgtctatatcttctttttatatccaatgtatttatgtctgatttttcttcatttatcatatataatggtccaaattctacacgtgcttcggattcatccagatcattaaggttcttataattgtaacatccttctcttccctcttctacatcttccttcttattcttattcttagcgtcacagaatctaccacagcaggatcccatgacgagcgtcatattaaactaatccattttcaattataatatatgattagtaatgaccattaaaataaaaaatattcttcataaccggcaagaaagtgaaaagttcacattgaaactatgtcagtagtatacatcatgaaatgatgatatatatatactctattttggtggaggattatatgatataattcgtggataatcatttttaagacacatttctttattcgtaaatcttttcacgttaaatgagtgtccatattttgcaatttcttcatatgatggcggtgtacgtggacgaggctgctcctgttcttgttgtggtcgccgactgtcgtgtctgcgtttagatccctccattatcgcgattgcgtagatggagtactattttataccttgtaattaaatttttttattaattaaacgtataaaaacgttccgtatctgtatttaagagccagatttcgtctaatagaacaaatagctacagtaaaaataactagaataattgctacacccactagaaaccacggatcgtaatacggcaatcggttttcgataataggtggaacgtatattttatttaaggacttaacaattgtctgtaaaccacaatttgcttccgcggatcctgtattaactatctgtaaaagcatatgttgaccgggcggagccgaacattctccgatatctaatttctgtatatctataatattattaacctccgcatacgcattacagttcttttctagcttggataccgcactaggtacatcgtctagatctattcctatttcctcagcgatagctcttctatccttttccggaagcaatgaaatcacttcaataaatgattcaaccatgagtgtgaaactaagtcgagaattactcatgcatttgttagttattcggagcgcgcaatttttaaactgtcctataacctctcctatatgaatagcacaagtgacattagtagggatagaatgttgagctaatttttgtaaataactatctataaaaagattatacaaagttttaaactctttagtttccgccatttatccagtctgagaaaatgtctctcataataaatttttccaagaaactaattgggtgaagaatggaaacctttaatctatatttatcacagtctgttttggtacacatgatgaattcttccaatgccgtactaaattcgatatctttttcgatttctggatatgtttttaataaagtatgaacaaagaaatggaaatcgtaataccagttatgtttaactttgaaattgttttttattttcttgttaatgattccagccacttgggaaaagtcaaagtcgtttaatgccgatttaatacgttcattaaaaacaaactttttatcctttagatgaattattattggttcattggaatcaaaaagtaagatattatcgggtttaagatctgcgtgtaaaaagttgtcgcaacagggtagttcgtagattttaatgtataacagagccatctgtaaaaagataaactttatgtattgtaccaaagatttaaatcctaatttgatagctaactcggtatctactttatctgccgaatacagtgctaggggaaaaattataatgtttcctctttcatattcgtagttagttctcttttcatgttcgaaaaagtgaaacatgcggttaaaatagtttataacattaatattactgttaataactgccggataaaagtgggatagtaatttcacgaatttgatactgtcctttctctcgttaaacgcctttaaaaaaactttagaagaatatctcaatgagagttcctgaccatccatagtttgtatcaataatagcaacatatgaagaacacgtttatacagagtatgtaaaaatgttaatttatagtttaatcccatggcccacgcacacacgattaattttttttcatctccctttagattgttgtatagaaatttgggtactgtgaactccgccgtagtttccatgggactatataattttgtggcctcgaatacaaattttactacatagttatctatcttaaagactataccatatcctcctgtagatatgtgataaaaatcgtcgtttataggataaaatcgtttatccttttgttggaaaaaggatgaattaatgtaatcattctcttctatctttagtagtgtttccttattaaaattcttaaaataatttaacaatctaactgacggagcccaattttggtgtaaatctaattgggacattatattgttaaaatacaaacagtctcctaatataacagtatctgataatctatggggagacatccattgatattcaggggatgaatcattggcaacacccatttattgtacaaaaagccccaatttacaaacgaaagtccaggtttgatagagacaaacaattaactattttgtctctgtttttaacacctccacagtttttaatttctttagtaatgaaattattcacaatatcagtatcttctttatctaccagagattttactaacttgataaccttggctgtctcattcaatagggtagtaatatttgtatgtgtgatattgatatctttttgaattgtttcttttagaagtgattctttgatggtgccagcatacgaattacaataatgcagaaactcggttaacatgcaggaattatagtaagccaattccaattgttgcctgtgttgtattagagtgtcaatatgagcaatggtgtccttgcgtttctctgatagaatgcgagcagcgattttggcgttatcatttgacgatatttctggaatgacgaatcctgtttctactaactttttggtaggacaaagtgaaacaatcaagaagatagcttctcctcctatttgtggaagaaattgaactcctctagatgatctactgacgatagtatctccttgacagatattggaccgaattacagaagtacctggaatgtaaagccctgaaaccccctcattttttaagcagattgttgccgtaaatcctgcactatgcccaagatagagagctcctttggtgaatccatctctatgtttcagtttaaccaagaaacagtcagctggtctaaaatttccatctctatctaatacagcatctaacttgatgtcaggaactatgaccggtttaatgttatatgtaacattgagtaaatccttaagttcataatcatcactgtcatcagttatgtacgatccaaacaatgtttctaccggcatagtggatacgaagatgctatccatcagaatgtttccctgattagtattttctatatagctattcttctttaaacgattttccaaatcagtaactatgttcatttttttaggagtaggacgcctagccagtatggaagaggattttctagatcctctcttcaacatctttgatctcgatggaatgcaaaaccccatagtgaaacaaccaacgataaaaataatattgtttttcactttttataattttaccatctgactcatggattcattaatatctttataagagctactaacgtataattctttataactgaactgagatatatacaccggatctatggtttccataattgagtaaatgaatgctcggcaataactaatggcaaatgtatagaacaacgaaattatactagagttgttaaagttaatattttctatgagctgttccaataaattatttgttgtgactgcgttcaagtcataaatcatcttgatactatccagtaaaccgtttttaagttctggaatattatcatcccattgtaaagcccctaattcgactatcgaatatcctgctctgatagcagtttcaatatcgacggacgtcaatactgtaataaaggtggtagtattgtcatcatcgtgataaactacgggaatatggtcgttagtaggtacggtaactttacacaacgcgatatataactttccttttgtaccatttttaacgtagttgggacgtcctgcagggtattgttttgaagaaatgatatcgagaacagatttgatacgatatttgttggattcctgattattcactataatataatctagacagatagatgattcgataaatagagaaggtatatcgttggtaggataatacatccccattccagtattctcggatactctattgatgacactagttaagaacatgtcttctattctagaaaacgaaaacatcctacatggactcattaaaacttctaacgctcctgattgtgtctcgaatgcctcgtacaaggatttcaaggatgccatagattctttgaccaacgatttagaattgcgtttagcatctgatttttttattaaatcgaatggtcggctctctggtttgctaccccaatgataacaatagtcttgtaaagataaaccgcaagaaaatttatacgcatccatccaaataaccctagcaccatcggatgatattaatgtattattatagattttccatccacaattattgggccagtatactgttagcaacggtatatcgaatagattactcatgtaacctactagaatgatagttcgtgtactagtcataatatctttaatccaatctaaaaaatttaaaattagattttttacactgttaaagttaacaaaagtattacccgggtacgtggatatcatatatggcattggtccattatcagtaatagctccataaactgatacggcgatggtttttatatgtgtttgatctaacgaggaagaaattcgcgcccacaattcatctctagatatgtatttaatatcaaacggtaacacatcaatttcgggacgcgtatatgtttctaaatttttaatccaaatataatgatgacctatatgccctattatcatactgtcaactatagtacacctagggaacttacgatacatctgtttcctataatcgttaaattttacaaatctataacatgctaaaccttttgacgacagccattcattaatttctgatatggaatctgtattctcgataccgtatcgttctaaagccagtgctatatctccctgttcgtgggaacgctttcgtataatatcgatcaacggataatctgaagtttttggagaataatatgactcatgatctatttcgtccataaacaatctagacataggaattggaggcgatgatcttaattttgtgcaatgagtcgtcaatcctataacttctaatcttgtaatattcatcatcgacataatactatctatgttatcatcgtatattagtataccatgaccttcttcatttcgtgccaaaatgatatacagtcttaaatagttacgcaatatctcaatagtttcataattgttagctgttttcatcaaggtttgtatcctgtttaacatgatggcgttctataacgtctctattttctatttttaattttttaaatttttaacgatttactgtggctagatacccaatctctctcaaatatttttttagcctcgcttacaagctgtttatctatactattaaaactgacgaatccgtgattttggtaatgggttccgtcgaaatttgccgaagtgatatgaacatattcgtcgtcgactatcaacaattttgtattattctgaatagtgaaaaccttcacagatagatcattttgaacacacaacgcatctagacttttggcggttgccatagaatatacgtcgttcttatcccaattaccaactagaagtctgatcttaactcctctattaatggctgcttctataatggagttgtaaatgtcgggccaatagtagctattaccgtcgacacgtgtagtgggaactatggccaaatgttcaatatctatactagtcttagctgacctgagtttatcaataactacatcggtatctagatctctagaatatcccaataggtgttccggagaatcagtaaagaacactccacctataggattcttaatatgatacgcagtgctaactggcaaacaacaagccgcagagcataaattcaaccatgaattttttgcgctattaaaggctttaaaagtatcaaatcttctacgaagatctgtggccagcgggggataatcagaatatacacctaacgttttaatcgtatgtatagatcctccagtaaatgacgcgtttcctacataacatctttcatcatctgacacccaaaaacaaccgagtagtagtcccacattattttttttatctatattaacggttataaaatttatatccgggcagtgactttgtagctctcccagatttcttttccctcgttcatctagcaaaactattattttaatccctttttcagatgcctcttttagtttatcaaaaataagcgctcccctagtcgtactcagaggattacaacaaaaagatgctatgtatatatatttcttagctagagtgataatttcgttaaaacattcaaatgttgttaaatgatcggatctaaaatccatattttctggtagtgtttctaccagcctacattttgctcccgcaggtaccgatgcaaatggccacatttagttaacataaaaacttatacatcctgttctatcaacgattctagaatatcatcggctatatcgctaaaattttcatcaaagtcgacatcacaacctaactcagtcaatatattaagaagttccatgatgtcatcttcgtctatttctatatccgtatccattgtagattgttgaccgattatcgagtttaaatcattactaatactcaatccttcagaatacaatctgtgtttcattgtaaatttataggcggtgtatttaagttggtagattttcaattatgtattaatatagcaacagtagttcttgctcctccttgattctagcatcctcttcattattttcttctacgtacataaacatgtccaatacgttagacaacacaccgacgatggcggccgcaggatcctgcgaagctttccagacattgttgaattagatcgataaaaattaattaatcagaggtttgtctcctgctggtctcgaccaccatcatgtccaacacagggggtccaagagccagccccctccagctccttctgccccaagaaaaacagacgatcctcattggtgggcaggaagccagggggcttcttgtttccagtggggagttcttcaggacccttgaccaagttgtcatccaggatggccacttcttccttgggggccactgatgctgtctgccgtgcgaggtcccaccacaacaatcccggggccagggtgctgcgcttggtggggcctgtcaggcagctgatgagggctccgcacagcacagtggtcagcgtgcccagggcaccgtaatagagataggagatggcatagaagctgtcagctaaggcgggtcggctggcgtccattcctgagctgggggccctgctggagtcgttagcagggaggagagccgggtccaggaggccagaggcgttgactgagagagccacgcagcgggcagccgacgatggcaggaccctcatggtctgctcgctgggtgggtacagcgtggcgcccaaggccacccacagcgacagcgccaagcccgcgcctagtcccgcgaggacgcccggtgtgttgcaggccggcaggaacattcccaagatgaaggctcccagcagggggccgctgatgactcccatgacggtgaaggagccctgaaggacacctcctccgagcagtgaggacagggctgccacggtgagacaggccgatccgtagatgagtgagagccccttggagataatcacgagtttcctgggtgccaggctccgcagccgaggtttgatgaggtcttctacagtgactgcagccatagcattgatgctggtggatgctgtgctgagggtgccactgtaagcacaggccaggaaaagcccggggactccaggcagatcttcgaagatgtccagcaccagcagaggcatgtactggtctggggcagagatgcgccccaggaggagagggtcgcagtcagtgtagaacacaaacatgacgatgccacagcaggcagcgctggacacgatcaggaacaggccgacctggttgatgagcagggccagcttggcctgcttctctgtgcggcaagccacgtagcgctgcacctgcgcctggttcacgccatacatggagagccacaccaacgtgccacccaccacaaaagtccagaatgtatagcggctcctcgggtcagggttaaagtccatgaggttgatccgggagtggttctgggccagcgtgagcacctggcggggcccgcccacaagcatgacaccgcgtgccaggacaacccagaagccacttagcatcaccacgacctggaacacatcagtccagaccacagccttcatgccgcccacagccgtgtagaaggtgcagataattccggtggacaggagcgacgcccagatgtccagcccggtcacttggttcaggatgagggccggtgcgtagattacgatgccggtgtacagcatcgtggctacaatgtactgcaaagtcccgcagagccgcactgcgcggctgaagcgcatctccaggtactcgtaggtgctggtgaggcccaggcggtagaagacgggcatgaagagcagggcggtgaggaccgagttcagaagctggcccaggcacatccagaggaacttgaggccatagcgataggcctccgacggcacgcccagcacctgcacggccgacatgaagctggcagacagcgacaggcccacgggcagggccgccaggcgccggcccccggtgaagaagtcctcagcgctgcgctgcccgccccgagccagcccgacccacagcccgatgccagtggacaccaggagcatgagggcaaagaccccgtagtcccaggctccgaaggtgggccgttccccggtctccacggcctccatggtggtcgacttcgagcaaaaaaagacgctagtttttcaatttttaagcttacagacacgaatatgactaaaccgatgaccatttaaaaacccctctctagctttcacttaaactgtatcgatcattcttttagcacatgtataatataaaaacattattctatttcgaatttaggcttccaaaaatttttcatccgtaaaccgataataatatatatagacttgttaatagtcggaataaatagattaatgcttaaactatcatcatctccacgattagagatacaatatttacattctttttgctgtttcgaaactttatcaatacacgttaatacaaacccaggaaggagatattgaaactgaggctgttgaaaatgaaacggtgaatacaataattcagataatgtaaaatcatgattccgtattctgatgatattagaactgctaatggatgtcgatggtatgtatctaggagtatctattttaacaaagcatcgatttgctaatatacaattatccttttgattaattgttattttattcatattcttaaaaggtttcatatttatcaattcttctacattaaaaatttccatttttaatttatgtagccccgcaatactcctcattacgtttcattttttgtctataatatccattttgttcatctcggtacatagattatccaattgagaagcgcatttagtagttttgtacattttaagtttattgacgaatcgtcgaaaactagttatagttaacattttattatttgataccctgatattaatacccctgccgttactattatttataactgatgtaatccacgtaacattggaattaactatcgatagtaatgcatcgacgcttccaaaattgtctattataaactcaccgataatttttttattgcatgttttcatattcattaggattatcaaatctttaatcttattacgattgtatgcgttgatattacaagacgtcattctaaaagacggaggatctccatcaaatgccagacaatcacgtacaaagtacatggaaataggttttgttctattgcgcatcatagatttatatagaacacccgtagaaatactaatttgttttactctataaaatactaatgcatctatttcatcgttttgtataacgtctttccaagtgtcaaattccaaatttttttcattgatagtaccaaattcttctatctctttaactacttgcatagataggtaattacagtgatgcctacatgccgttttttgaaactgaatagatgcgtctagaagcgatgctacgctagtcacaatcaccactttcatatttagaatatatatatgtaaaaatatagtagaatttcattttgtttttttctatgctataaatgaattctcattttgcatctgctcatactccgttttatattaataccaaagaaggaagatatctggttctaaaagccgttaaagtatgcgatgttagaactgtagaatgcgaaggaagtaaagcttcctgcgtactcaaagtagataaaccctcatcgcccgcgtgtgagagaagaccttcgtccccgtccagatgcgagagaatgaataaccctggaaaacaagttccgtttatgaggacggacatgctacaaaatatgttcgcggctaatcgcgataatgtagcttctagacttttgtcctaaaatactattatatccttttcgatattaataaatccgtgtcgtccaggttttttatctctttcagtatgtgaatagataggtattttatctctattcatcatcgaatttaagagatccgataaacattgtttgtattctccagatgtcagcatctgatacaacaatatatgtgcacataaacctctggcacttatttcatgtaccttccccttatcactaaggagaatagtatttgagaaatatgtatacatgatattatcatgaattagatatacagaatttgtaacactctcgaaatcacacgatgtgtcggcgttaagatctaatatatcactcgataacacattttcatctagatacactagacattttttaaagctaaaatagtctttagtagtaacagtaactatgcgattattttcatcgatgatacatttcatcggcatattattacgcttaccatcaaagactataccatgtgtatatctaacgtattctagcatggttgccatacgcgcattaaacttttcaggatctttggatagatcttccaatctatctatttgagaaaacatttttatcatgttcaatagttgaaacgtcggatccactatatagatattatctataaagattttaggaactacgttcatggtatcctggcgaatattaaaactatcaatgatatgattatcgttttcatcttttatcaccatatagtttctaagatatgggattttacttaatataatattatttcccgtgataaattttattagaaaggccaaatctataagaaaagtcctagaattagtctgaagaatatctatatcgccgtatagtatatttggattaattagatatagagaatatgatccgtaacatatacaacttttattatggcgtctaagatattcttccatcaacttattaacatttttgactagggaagatacattatgacgtcccattacttttgccttgtctattactgcgacgttcatagaatttagcatatctcttgccaattcttccattgatgttacattataagaaattttagatgaaattacatttggagctttaatagtaagaactcctaatatgtccgtgtatgtggtcactaatacagattgtagttctataatcgtaaataatttacctatattatatgtttgagtctgtttagaaaagtagctaagtatacgatcttttatttctgatgcagatgtattaacatcggaaaaaaatctttttttattcttttttactaaagatacaaatatgtctttgttaaaaacagttattttctgaatatttctagcttgtaattttaacatatgatattcgttcacactaggtactctgcctaaataggtttctataatctttaatgtaatattaggaaaagtattctgatcaggattcctattcattttgaggatttaaaactctgattattgtctaatatggtctctacgcaaactttttcacagagcgatagagtttttgataactcgtttttcttaagaaatataaaactactgtctccagagctcgctctatcttttattttatctaattcgatacaaactcctgatactggttcagaaagtaattcattaattttcagtcctttatagaagatatttaatatagataatacaaaatcttcagtttttgatatcgatctgattgatcctagaactagatatattaataacgtgctcattaggcagtttatggcagcttgataattagatatagtatattccagttcatatttattagataccgcattgcccagattttgatattctatgaattcctctgaaaataaatccaaaataactagacattctattttttgtggattagtgtactctcttccctctatcatgttcactactggtgtccacgatgataaatatctagagggaatataatatagtccataggatgccaatctagcaatgtcgaataactgtaattttattcttcgctcttcattatgaattgattcttgaggtataaacctaacacaaattatattattagacttttcgtatgtaatgtctttcatgttataagtttttaatcctggaatagaatctattttaatgaggcttttaaacgcagagttctccaacgagtcaaagcataatactctgttgtttttcttatatacgatgttacgattttcttctttgaatggaataggtttttgaattagtttataattacaacataatagataaggaagtgtgcaaatagtacgcggaaaaaacataatagctcccctgttttcatccatggttttaagtaaatgatcactggcttctttagtcaatggatattcgaacattaaccgtttcatcatcattggacagaatccatatttcttaatgtaaagagtgatcaaatcattgtgtttattgtaccatcttgttgtaaatgtgtattcggttatcggatctgctcctttttctattaaagtatcgatgtcaatctcgtctaagaattcaactatatcgacatatttcatttgtatacacataaccattactaacgtagaatgtataggaagagatgtaacgggaacagggtttgttgattcgcaaactattctaatacataattcttctgttaatacgtcttgcacgtaatctattatagatgccaagatatctatataattattttgtaagatgatgttaactatgtgatctatataagtagtgtaataattcatgtattttgatatatgttccaactctgtctttgtgatgtctagtttcgtaatatctatagcatcctcaaaaaatatattcgcatatattcccaagtcttcagttctatcttctaaaaaatcttcaacgtatggaatataataatctattttacctcttctgatatcattaatgatatagtttttgacactatcttctgtcaattgattcttattcactatatctaagaaacggatagcgtccctaggacgaactactgccattaatatctctattatagcttctggacataattcatctattataccagaattaatgggaactattccgtatctatctaacatagttttaagaaagtcagaatctaagacttgatgttcatatattggttcatacatgaaatgatctctattgatgatagtgactatttcattctctgaaaattggtaactcattctatatatgctttccttgttgatgaaggatagaatatactcaatagaatttgtaccaacaaactgttctcttatgaatcgtatatcatcatctgaaataatcatgtaaggcatacatttaacaattagagacttgtctcctgttatcaatatactattcttgtgataatttatgtgtgaggcaaatttgtccacgttctttaattttgttatagtagatatcaaatccaatggagctacagttcttggcttaaacagatatagtttttctggaacaaattctacaacattattataaaggactttgggtagataagtgggatgaaatcctattttaattaatgcgatagccttgtcctcgtgcagatatccaaacgcttttgtgatagtatggcattcattgtctagaaacgctctacgaatatctgtgacagatatcatctttagagaatatactagtcgcgttaatagtactacaatttgtattttttaatctatctcaataaaaaaattaatatgtatgattcaatgtataactaaactactaactgttattgataactagaatcagaatctaatgatgacgtaaccaagaagtttatctactgccaatttagctgcattatttttagcatctcgtttagattttccatcggccttatcgaatactcttccgtcgatgtctacacaggcataaaatgtaggagagttactaggcccaactgattcaatacgaaaagaccaatctctcctagtaatttggcagtactcattaataacggtgacagggttagcatctttccaatcaataatttttttagccggaataacatcatcaaaagacttatgatcctctctcattgatttttcgcgggatacatcatctattatgacgtcagccatagcatcagcatccggcttatccgcctccgttgtcataaaccaacgaggaggaatatcgtcggagctgtacaccatagcactacgttgaagatcgtacagagctttattaacttctcgcttctccatattaagttgtctagttagttgtgcagcagtagctccttcgattccaatgtttttaatagccgcacacacaatctctgcgtcagaacgctcgtcaatatagatcttagacatttttagagagaactaacgcaaccagcaataaaactgaacctactttatcatttttttattcatcatcctctggtggttcgtcgttcctatcaaatgtagctctgattaacccgtcatctataggtgatgctggttctggagattctggaggagatggattattatctggaagaatctctgttatttccttgttttcatgtatcgattgcgttgtaacattaagattgcgaaatgctctaaatttgggaggcttaaagtgttgtttgcaatctctacacgcgtgtctaactagtggaggttcgtcagctgctctagtttgaatcatcatcggcgtagtattcctacttttacagttaggacacggtgtattgtatttctcgtcgagaacgttaaaataatcgttgtaactcacatcctttattttatctatattgtattctactcctttcttaatgcattttataccgaataagagatagcgaaggaattctttttcggtgccgctagtacccttaatcatatcacatagtgttttatattccaaatttgtggcaatagacggtttatttctatacgatagtttgtttctggaatcctttgagtattctataccaatattattctttgattcgaatttagtttcttcgatattagattttgtattacctatattcttgatgtagtactttgatgatttttccatggcccattctattaagtcttccaagttggcatcatccacatattgtgatagtaattctcggatatcagtagcggctaccgccattgatgtttgttcattggatgagtaactactaatgtatacattttccatttataacacttatgtattaactttgttcatttatattttttcattattatgttgatattaacaaaagtgaatatatatatgttaataattgtattgtggttatacggctacaattttataatgagtgaaagtcagtgtccgatgatcaatgacgatagctttactctgaaaagaaagtatcaaatcgatagtgcggagtcaacaataaaaatggataagaagaggataaagtttcagaatagagccaaaatggtaaaagaaataaatcagacaataagagcagcacaaactcattacgagacattgaaactaggatacataaaatttaagagaatgattatgactactactctagaagatatagcaccatctattccaaataatcagaaaacttataaactattctcggacatttcagccatcggcaaagcatcacagaatccgagtaagatggtatatgctctgctgctttacatgtttcccaatttgtttggagatgatcatagattcattcgttatagaatgcatccaatgagtaaaatcaaacacaagatcttctctcctttcaaacttaatcttattagaatattagtggaagaaagattctataataatgaatgcagatctaataaatggagaataattggaacacaagttgataaaatgttgatagctgaatctgataaatatacaatagatgcaaggtataacctaaaacccatgtatagaatcaagggagaatctgaagaagataccctctttatcaaacagatggtagaacaatgtgtgacatcccaggaattggtggaaaaagtgttgaagatactgtttagagatttgttcaagagtggagaatacaaagcgtacagatacgatgatgatgtagaaaatggatttattggattggatacactaaaattaaacattgttcatgatatagttgaaccatgtatgcctgttcgtaggccagtggctaagatactgtgtaaagaaatggtaaataaatactttgagaatccgctacatattattggtaaaaatcttcaagagtgcattgactttgttagtgaataggcatttcatctttctccaatactaattcaaattgttaaattaataatggatagtataaatagttattagttataagatagtaaaaataattattagaataagagtgtagtatcatagataactctcttctataaaaatggattttattcgtagaaagtatcttatatacacagtagaaaataatatagattttttaaaggatgatacattaagtaaagtaaacaattttaccctcaatcatgtactagctctcaagtatctagttagcaattttcctcaacacgttattactaaggatgtattagctaataccaatttttttgttttcatacatatggtacgatgttgtaaagtgtacgaagcggttttacgacacgcatttgatgcacccacgttgtacgttaaagcattgactaagaattatttatcgtttagtaacgcaatacaatcgtacaaggaaaccgtgcataaactaacacaagatgaaaaatttttagaggttgccgaatacatggacgaattaggagaacttataggcgtaaattatgacttagttcttaatccattatttcacggaggggaacccatcaaagatatggaaatcatttttttaaaactgtttaagaaaacagacttcaaagttgttaaaaaattaagtgttataagattacttatttgggcatacctaagcaagaaagatacaggcatagagtttgcggataatgatagacaaaatatatacactctatttcaacaaactggtagaatcgtccatagcaatctaacagaaacgtttagagattatatctttcccggagataagactagctattgggtgtggttaaacgaaagtatagctaatgatgcggatatcgttcttaatagacacgccattaccatgtatgataaaattcttagttatatatactctgagataaaacaaggacgcgttaataaaaacatgcttaagttagtttatatctttgagcctgaaaaagatatcagagaacttctgctagaaatcatatatgatattcctggagatatcctatctattattgatgcaaaaaacgacgattggaaaaaatattttattagtttttataaagctaattttattaacggtaatacatttattagtgatagaacgtttaacgaggacttattcagagttgttgttcaaatagatcccgaatatttcgataatgaacgaattatgtctttattctctacgagtgctgcggacattaaacgatttgatgagttagatattaataacagttatatatctaatataatttatgaggtgaacgatatcacattagatacaatggatgatatgaagaagtgtcaaatctttaacgaggatacgtcgtattatgttaaggaatacaatacatacctgtttttgcacgagtcggatcccatggtcatagagaacggaatactaaagaaactgtcatctataaaatccaagagtagacggctgaacttgtttagcaaaaacattttaaaatattatttagacggacaattggctcgtctaggtcttgtgttagatgattataaaggagacttgttagttaaaatgataaaccatcttaagtctgtggaggatgtatccgcattcgttcgattttctacagataaaaaccctagtattcttccatcgctaatcaaaactattttagctagttataatatttccatcatcgtcttatttcaaaggtttttgagagataatctatatcatgtagaagaattcttggataaaagcatccatctaaccaagacggataagaaatatatacttcaattgataagacacggtagatcatagaacagaccaaatatattattaataatttgtatatacatagatataattatcacacatttttgataaatgggaactgctgcaacaattcagactcccaccaaattaatgaataaagaaaatgcagaaatgattttggaaaaaattgttgatcatatagttatgtatattagtgacgaatcaagtgattcagaaaataatcctgaatatattgattttcgtaacagatacgaagactatagatctctcattataaaaagtgatcacgagtttgtaaagctatgtaaaaatcatgcggagaaaagttctccagaaacgcaacaaatgattatcaaacacatatacgaacaatatcttattccagtatctgaagtactattaaaacctataatgtccatgggtgacataattacatataacggatgtaaagacaatgaatggatgctagaacaactctctaccctaaactttaacaatctccgcacatggaactcatgtagcataggcaatgtaacgcgtctgttttatacattttttagttatctgatgaaagataaactaaatatataagtataatcccattctaatactttaacctgatgtattagcatcttattagaatattaacctaactaaaagacataacataaaaactcattacatagttgataaaaagcggtaggatataaatattatggctgccaccgttccgcgttttgacgacgtgtacaaaaatgcacaaagaagaattctagatcaagaaacattttttagtagaggtctaagtagaccgttaatgaaaaacacatatctatttgataattacgcgtatggatggataccagaaactgcaatttggagtagtagatacgcaaacctagatgctagtgactattatcccatttcgttgggattacttaaaaagttcgagtttctcatgtctctatataaaggtcctattcccgtatatgaagaaaaagtaaatactgaattcatagccaatggatcgttctctggtagatacgtatcatatcttcgaaagttttctgcccttccaacaaacgagtttattagttttttgttactgacttccattccaatctataatatcttgttctggtttaaaaacacacagtttgatattactaaacacacattattcagatacgtctatacagataatgccaaacacctggcgttggctaggtatatgcatcaaacaggagactataagcctttgtttagtcgtctcaaagagaattatatatttaccggtcccgttccaataagtatcaaagatatagatcaccctaatcttagtagagcaagaagtccatccgattatgagacattagctaatattagtactatattgtactttaccaagtatgatccggtattaatgtttttattgttttacgtacctgggtattcaattactacaaaaattactccagccgtagaatatctaatggataaactgaatctaacaaagagcgacgtacaactgttgtaaattattttatgcttcgtaaaatgtaggttttgaaccaaacattctttcaaagaatgagatgcataaaactttattatccaatagattgactatttcggacgtcaatcgtttaaagtaaacttcgtaaaatattctttgatcactgccgagtttaaaacttctatcgataattgtctcatatgttttaatatttacaagttttttggtccatggtacattagccggacaaatatatgcaaaataatatcgttctccaagttctatagtttctggattatttttattatattcagtaactaaatacatattagggttatctgcggatttataatttgagtgatgcattctactcaacataaataattctagaggagacgatctactatcaaattcggatcgtaaatctgtttctaaagaacggagaatatctatacatacctgattagaattcatccgtccttcagacaacatctcagacagtctggttttgtacatcttaatcatattcttatgaaacttggaaacatctcttctagtttcactagtacctttattaattctctcaggtacagattttgaattcgacgatgctgagtatttcatcgttgtatatttcttcttcgattgcataatcagattcttatataccgcctcaaactctattttaaaattattaaacaatactctattattaatcagtcgttctaactctttcgctatttctatagacttatctacatcttgactgtctatctctgtaaacacggagtcggtatctccatacacgctacgaaaacgaaatctgtaatctataggcaacgatgttttcacaatcggattaatatctctatcgtccatataaaatggattacttaatggattggcaaaccgtaacataccgttagataactctgctccatttagtaccgattctagatacaagatcattctacgtcctatggatgtgcaactcttagccgaagcgtatgagtatagagcactatttctaaatcccatcagaccatatactgagttggctactatcttgtacgtatattgcatggaatcatagatggccttttcagttgaactggtagcctgttttagcatctttttatatctggctctctctgccaaaaatgttcttaatagtctaggaatggttccttctatcgatctatcgaaaattgctatttcagagatgaggttcggtagtctaggttcacaatgaaccgtaatatatctaggaggtggatatttctgaagcaatagctgattatttatttcttcttccaatctattggtactaacaacgacaccgactaatgtttccggagatagatttccaaagatacacacattaggatacagactgttataatcaaagattaatacattattactaaacattttttgttttggagcaaataccttaccgccttcataaggaaacttttgttttgtttctgatctaactaagatagttttagtttccaacaatagctttaacagtggacccttgatgactgtactcgctctatattcgaataccatggattgaggaagcacatatgttgacgcacccgcgtctgtttttgtttctactccataatactcccacaaatactgacacaaacaagcatcatgaatacagtatctagccatatctaaagctatgtttagattataatccttatacatctgagctaaatcaacgtcatcctttccgaaagataatttatatgtatcattaggtaaagtaggacataatagtacgactttaaatccattttcccaaatatctttacgaattactttacatataatatcctcatcaacagtcacataattacctgtggttaaaacctttgcaaatgcagcggctttgcctttcgcgtctgtagtatcgtcaccgatgaacgtcatttctctaactcctctatttaatactttacccatgcaactgaacgcgttcttggatatagaatccaatttgtacgaatccaatttttcaaatttttgaatgaatgaatatagatcgaaaaatatagttccattattgttattaacgtgaaacgtagtattggccatgccgcctactcccttatgactagactgatttctctcataaatacagagatgtacagcttcctttttgtccggagatctaaagataattttctctcctgttaataactctagacgattagtaatatatctcagatcaaagttatgtccgttaaaggtaacgacgtagtcgaacgttagttccaacaattgtttagctattcgtaacaaaactatttcagaacatagaactagttctcgttcgtaatccatttccattagtgactgtatcctcaaacatcctctatcgacggcttcttgtatttcctgttccgttaacatctcttcattaatgagcgtaaacaataatcgtttaccacttaaatcgatataacagtaacttgtatgcgagattgggttaataaatacagaaggaaacttcttatcgaagtgacactctatatctagaaataagtacgatcttgggatatcgaatctaggtatttttttagcgaaacagttacgtggatcgtcacaatgataacatccattgttaatctttgtcaaatattgctcgtccaacgagtaacatccgtctggagatatcccgttagaaatataaaaccaactaatattgagaaattcatccatggtggcattttgtatgctgcgtttctttggctcttctatcaaccacatatctgcgacggagcattttctatctttaatatctagattataacttattgtctcgtcaatgtctatagttctcatctttcccaacggcctcgcattaaatggaggaggagacaatgactgatatatttcgtccgtcactacgtaataaaagtaatgaggaaatcgtataaatacggtctcgccatttcgacatctggatttcagatataaaaatctgttttcaccgtgactttcaaaccaattaatgcaccgaacatccatttatagaatttagaaatatattttcatttaaatgaatcccaaacattggggaagagccgtatggaccattatttttatagtactttcgcaagcgggtttagacggcaacatagaagcgtgtaaacgaaaactatatactatagttagcactcttccatgtcctgcatgtagacggcacgcgactatcgctatagaggacaataatgtcatgtctagcgatgatctgaattatatttattattttttcatcagattatttaacaatttggcatctgatcccaaatacgcgatcgatgtgacaaaggttaaccctttataaacttaacccattataaaacttatgattagtcacaactgaaataaccgcgtgattattttttggtataattctacacggcatggtttctgtgactatgaattcaacccccgttacattagtgaaatctttaacaaacagcaagggttcgtcaaagacataaaactcattgtttacaatcgaaatagaccccctatcacacttaaaataaaaaatatccttatcctttaccaccaaataaaattctgattggtcaatgtgaatgtattcacttaacagttccacaaatttatttattaactccgaggcacatacatcgtcggtattttttatggcaaactttactcttccagcatccgtttctaaaaaaatattaacgagttccatttatatcatccaatattattgaaatgacgttgatggacagatgatacaaataagaaggtacggtacctttgtccaccatctcctccaattcatgctctattttgtcattaactttaatgtatgaaaacagtacgccacatgcttccatgacagtgtgtaacactttggatacaaaatgtttgacattagtataattgtccaagactgtcaatctataatagatagtagctataatatattctatgatggtattgaagaagatgacaaccttggcatattgatcatttaacacagacatggtatcaacagatagcttgaatgaaagagaatcagtaattggaataagcgtcttctcgatagagtgtccgtataccaacatgtctgatattttgatgtattccattaaattatttagttttttctttttattctcgttaaacagcatttctgtcaacggaccccaacatcgttgaccgattaagttttgattgatttttccgtgtaaggcgtatctagtcagatcgtatagcctatccaataatccatcgtctgtgtgtagatcacatcgtacactttttaattctctatagaagagcgacagacatctggagcaattacagacagcaatttctttattctctacagatgtaagatacttgaagacattcctatgatgatgcagaattttggataacacggtattgatggtatctgttaccataattcctttgatggctgatagtgtcagagcacaagatttccaatctttgacaatttttagcaccattatctttgttttgatatctatatcagacagcatggtgcgtctgacaacacagggattaagacggaaagatgaaatgattctctcaacatcttcaatagataccttgctattttttctggcattatctatatgtgcgagaatatcctctagagaatcagtatcctttttgatgatagtggatctcaatgacatgggacgtttaaaccttcttattctatcaccagattgcatggtgatttgtcttctttcttttatcataatgtaatctctaaattcatcggcaaattgtctatatctaaaatcataatatgagatgtttacctctacaaatatctgttcgtccaatgttagagtatttacatcagttttgtattccaaattaaacatggcaacggatttaattttatattcctctattaagtcctcgtcgataataacagaatgtagataatcatttaatccgtcgtacatggttggaagatgcttgttgacaaaatctttaattgtcttgatgaaggtgggactatatctaacatcttgattaataaaatttataacattgtccataggatactttgtaactagttttatacacatctcttcatcggtaagtttagacagaatatcgtgaacaggtggtatattatattcatcagatatacgaagaacaatgtccaaatctatattgtttaatatattatatagatgtagcgtagctcctacaggaatatctttaactaagtcaatgatttcatcaaccgttagatctattttaaagttaatcatataggcattgatttttaaaaggtatgtagccttgactacattctcattaattaaccattccaagtcattgtgtgtaagaagattatattctatcataagcttgactacatttggtcccgataccattaaagaattcttatgatataaggaaacagattttaggtactcatctactctacaagaattttggagagccttaacgatatcagtgacgtttattatttcaggaggaaagaatctaacattgagaatatcggaattaatagcttccagatacagtgattttggcaatagtccgtgtaatccataatccagtaacacgagctggtgcttgctagacaccttttcaatgtttaatttttttgaaataagctttgataaagccttcctcgcaaattccggatacatgaacatgtcggcgacatgattaagtattgttttttcattatttttatattttctcaacaagttctcaataccccaatagatgatagaatatcacccaatgcgtccatgttgtctatttccaacaggtcgctatatccaccaatagaagtttttccaaaaaagattctaggaacagttctaccaccagtaatttgttcaaaataatcccgcaattcattttcgggtttaaattctttaatatcgacaatttcatacgctcctcttttgaaactaaacttatttagaatatccagtgcatttctacaaaaaggacatgtatacttgacaaaaattgtcactttgttattggccaacctttgttgtacaaattcctcggccattttaatatttaagtgatataaaactatctcgacttatttaactctttagtcgagatatatggacgcagatagctatatgatagccaactacagaaggcaaacgctataaaaaacataattacgacgagcatatttataaatatttttattcagcattacttgatatagtaatattaggcacagtcaaacattcaaccactctcgatacattaactctctcattttctttaacaaattctgcaatatcttcgtaaaaagattcttgaaactttttagaatatctatcgactctagatgaaatagcgttcgtcaacatactatgttttgtatacataaaggcgcccattttaacagtttctagtgacaaaatgctagcgatcctaggatcctttagaatcacatagattgacgattcgtctctcttagtaactctagtaaaataatcatacaatctagtacgcgaaataatattatccttgacttgaggagatctaaacaatctagttttgagaacatcgataagttcatcgggaatgacatacatactatctttaatagaactcttttcatccagttgaatggattcgtccttaaccaactgattaatgagatcttctattttatcattttccagatgatatgtatgtccattaaagttaaattgtgtagcgcttctttttagtctagcagccaatactttaacatcactaatatcgatatacaaaggagatgatttatctatggcattaagaattcgtttttcgacatccgtcaaaaccaattcctttttgcctgtatcatccagttttccatcctttgtaaagaaattattttctactagactattaataagactgataaggattcctccataattgcacaatccaaactttttaacaaaactagactttacgagatctacaggaatgcgtacttcaggttttttagcttgtgattttttcttttgcggacattttctagtaaccaactcatctaccatttcattgattttagcagtgaaataagctttcaatgcacgggcactgatactattgaaaacgagttgatcttcaaattccgccatttaagttcaccaaacaacttttaaatacaaatatatcaatagtagtagaataagaactataaaaaaaataataattaaccaaccccaacaaccggtattattagttgatgtggtagttttctcatcacttagaacagatttaacaatttctataaagtctgtcaaatcatcttccggagaccccataaatacaccaaatatagcggcgtacaacttatccatttatacattgaatattggcttttctttatcgctatcttcatcatattcatcatcaatatcaacaagtcccagattacgagccagatcttcttctacattttcagtcattgatacacgttcactatctccagagagtccgataacgttagccaccacttctctatcaatgattagtttcttgagcgcgaaagtaatttttgtttccgttccggatctatagaagacgataggtgtgataattgccttggccaattgtctttctcttttactgagtgattctagttcaccttctatagatctgagaatggatgattctccagtcgaaacatattctaccatggatccgtttaatttgttgatgaagatggattcatccttaaatgttttctctgtaatagtttccaccgaaagactatgcaaagaatttggaatgcgttccttgtgcttaatgtttccatagacggcttctagaagttgatacaacataggactagccgcggtaacttttatttttagaaagtatccatcgcttctatcttgtttagatttatttttataaagtttagtctctccttccaacataataaaagtggaagtcatttgactagataaactatcagtaagttttatagagatagacgaacaattagcgtattgagaagcatttagtgtaacgtattcgatacattttgcattagatttactaatcgattttgcatactctataacacccgcacaagtctgtagagaatcgctagatgcagtaggtcttggtgaagtttcaactctcttcttgattaccttactcatgattaaacctaaataattgtactttgtaatataatgatatatattttcactttatctcatttgagaataaaaatgtttttgtttaaccactgcatgatgtacagatttcggaatcgcaaaccaccagtggttttattttatccttgtccaatgtgaattgaatgggagcggatgcgggtttcgtacgtagatagtacattcccgtttttagaccgagactccatccgtaaaaatgcatactcgttagtttggaataactcggatctgctatatggatattcatagattgactttgatcgatgaaggctcccctgtctgcagccatttttatgatcgtcttttgtggaatttcccaaatagttttataaactcgcttaatatcttctggaaggtttgtattctgaatggatccaccatctgccataatcctattcttgatctcatcattccataattttctctcggttaaaactctaaggagatgcggattaactacttgaaattctccagacaatactctccgagtgtaaatattactggtatacggttccaccgactcattatttcccaaaatttgagcagttgatgcagtcggcataggtgccaccaataaactatttctaagaccgtatgttctgattttatcttttagaggttcccaattccaaagatccgacggtacaacattccaaagatcatattgtagaataccgttactggcgtacgatcctacatatgtatcgtatggtccttccttctcagctagttcacaactcgcctctaatgcaccgtaataaatggtttcgaagatcttcttatttagatcttgtgcttccaggctatcaaatggataatttaagagaataaacgcgtccgctaatccttgaacaccaataccgataggtctatgtctcttattagagatttcagcttctggaataggataataattaatatctataattttattgagatttctgacaattactttgaccacatccttcagtttgagaaaatcaaatcgcccatctattacaaacatgttcaaggcaacagatgccagattacaaacggctacctcattagcatccgcatattgtattatctcagtgcaaagattactacacttgatagttcctaaattttgttgattactctttttgttacacgcatccttataaagaatgaatggagtaccagtttcaatctgagattctataatcgctttccagacgactcgagcctttattatagatttgtatctcctttctctttcgtatagtgtatacaatcgttcgaactcgtctccccaaacattgtccaatccaggacattcatccggacacatcaacgaccactctccgtcatccttcactcgtttcataaagagatcaggaatccaaagagctataaatagatctctggttctatgttcctcgtttcctgtattctttttaagatcgaggaacgccataatatcagaatgccacggttccaagtatatggccataactccaggccgtttgtttcctccctgatctatgtatctagcggtgttattataaactctcaacattggaataataccgtttgatataccattggtaccggagatatagcttccactggcacgaatattactaattgatagacctattccccctgccattttagagattaatgcgcatcgttttaacgtgtcatagataccctctatgctatcatcgatcatgttaagtagaaaacagctagacatttggtgacgactagttcccgcattaaataaggtaggagaagcgtgcgtaaaccatttttcagaaagtagattgtacgtctcaatagctgagtctatatcccattgatgaattcctactgcgacacgcattaacatgtgctgaggtctttcaacgatcttgttgtttattttcaacaagtaggatttttccaaagttttaaaaccaaaatagttgtatgaaaagtctcgttcgtaaataataaccgagttgagtttatccttatatttgttaactatatccatggtgatacttgaaataatcggagaatgtttcccatttttaggattaacatagttgaataaatcctccatcacttcactaaatagtttttttgtttccttgtgtagatttgatacggctattctggcggctagaatggcataatccggatgttgtgtagtacaagtggctgctatttcggctgccagagtgtccaattctaccgttgttactccattatatattccttgaataaccttcatagctattttaataggatctatatgatccgtgtttaagccataacataattttctaatacgagacgtgattttatcaaacatgacattttccttgtatccatttcgtttaatgacaaacatttttgttggtgtaataaaaaaattatttaacttttcattaatagggatttgacgtatgtagcgtacaaaatgattgttcctggtatatagataaagagtcctatatatttgaaaatcgttacggctcgattaaactttaatgattgcatagtgaatatatcattaggatttaactccttgactatcatggcggcgccagaaattaccatcaaaagcattaatacagttataccgatcgcagttagaacggttatagcatccaccatttatatctaaaaattagatcaaagaatatgtgacaaagtcctagttgtatactgagaattgacgaaacaatgtttcttacatatttttttcttattagtaaccgacttaatagtaggaactggaaaactagacttgattattctataagtatagatacccttccaaataatattctctttgataaaagttccagaaaatgtagaattttttaaaaagttatcttttgctattaccaagattgtgtttagacgcttattattaatatgagtgatgaaatccacaccgcctctagatatcgcctttatttccacattagatggtaaatccaatagtgaaactatctttttaggaatgtatggactcgcgtttagaggagtaaacgtcttaggcgtcggaaaggatgattcatcaaacgaataaacaatttcacaaatggatgttaatgtattagtaggaaattttttgacgctattggaattgaagattctaatggatgatgttctacctatttcatccgataacatgttaatttccgacaccaacggttttaatatttcgatgatatacggtagtctctctttcggacttatatagcttattccacaatacgagtcattatatactccaaaaaacaaaataactagtataaaatctgtatcgaatgggaaaaacgaaattatcgacataggtatagaatccggaacattgaacgtattaatacttaattctttttctgtggtaagtaccgataggttattgacattgtatggttttaaatattctataacttgagacttgatagatattagtgatgaattgaaaattatttttatcaccacgtgtgtttcaggatcatcgtcgacgcccgtcaaccaaccgaacggagtaaaataaatatcattaatatatgctctagatattagtatttttatcaatcctttgattatcatcttctcgtaggcgaatgattccatgatcaagagtgatttaagaacatcctccggagtattaatgggcttagtaaacagtccatcgttgcaataataaaagttatccaagttaaaggatattatgcattcgtttaaagatatcacctcatctgacggagacaattttttggtaggttttagagactttgaagctacttgtttaacaaagttattcatcgtcgtctactattctatttaattttgtagttaatttatcacatatcacattaattgactttttggtccacttttccatacgtttatattcttttaatcctgcgttatccgtttccgttatatccagggatagatcttgcaagttaaatagaatgctcttaaataatgtcattttcttatccgctaaaaatttaaagaatgtataaacctttttcagagatttgaaactcttaggtggtgtcctagtacacaatatcataaacaaactaataaacattccacattcagattccaacagctgattaacttccacattaatacagcctattttcgctccaaatgtacattcgaaaaatctgaataaaacatcgatgtcacaatttgtattatccaatacagaatgtttgtgattcgtgttaaaaccatcggagaaggaatagaaataaaaattattatagtggtggaattcagttggaatattgcctccggagtcataaaaggatactaaacattgttttttatcataaattacacatttccaatgagacaaataacaaaatccaaacattacaaatctagaggtagaacttttaattttgtctttaagtatatacgataagatatgtttattcataaacgcgtcaaatttttcatgaatcgctaaggagtttaagaatctcatgtcaaattgtcctatataatccacttcggatccataagcaaactgagagactaagttcttaatacttcgattgctcatccaggctcctctctcaggctctattttcatcttgacgacctttggattttcaccagtatgtattcctttacgtgataaatcatcgattttcaaatccatttgtgagaagtctatcgccttagatactttttcccgtagtcgaggtttaaaaaaatacgctaacggtatactagtaggtaactcaaagacatcatatatagaatggtaacgcgtctttaactcgtcggttaactctttcttttgatcgagttcgtcgctactattgggtctgctcaggtgccccgactctactagttccaacatcataccgataggaatacaagacactttgccggcggttgtagatttatcatatttttccactacatatccgttacaatttgttaaaaatttagatacatctatattgctacataatccagctagtgaatatatatgacataataaattggtaaatcctagttctggtattttactaattactaaatctgtatatctttccatttatcatggaaaagaatttaccagatatcttcttttttccaaactgcgttaatgtattctcttacaaatattcacaagatgaattcagtaatatgagtaaaacggaacgtgatagtttctcattggccgtgtttccagttataaaacatagatggcataacgcacacgttgtaaaacataaaggaatatacaaagttagtacagaagcacgtggaaaaaaagtatctcctccatcactaggaaaacccgcacacataaacctaaccgcgaagcaatatatatacagtgaacacacaataagctttgaatgttatagttttctaaaatgtataacaaatacagaaatcaattcgttcgatgagtatatattaagaggactattagaagctggtaatagtttacagatattttccaattccgtaggtaaacgaacagatactataggtgtactagggaataagtatccatttagcaaaattccattggcctcattaactcctaaagcacaacgagagatattttcagcgtggatttctcatagacctgtagttttaactggaggaactggagtgggtaagacgtcacaggtacccaagttattgctttggtttaattatttatttggtggattctctactctagataaaatcactgactttcacgaaagaccagtcattctatctcttcctaggatagctttagttagattgcatagcaataccattttaaaatcattgggatttaaggtactagatggatctcctatttctttacggtacggatctataccggaagaattaataaacaaacaaccaaaaaaatatggaattgtattttctacccataagttatctctaacaaaactatttagttatggcactcttattatagacgaagttcatgagcatgatcaaataggagatattattatagcagtagcgagaaagcatcatacgaaaatagattctatgtttttaatgactgccacgttagaggatgacagggaacggctaaaagtatttttacctaatcccgcatttatacatattcctggagatacactgtttaaaattagcgaggtatttattcataataagataaatccatcttccagaatggcatacatagaagaagaaaagagaaatttagttactgctatacagatgtatactcctcctgatggatcatccggtatagtctttgtggcatccgttgcacagtgtcacgaatataaatcatatttagaaaaaagattaccgtatgatatgtatattattcatggtaaggtcttagatatagacgaaatattagaaaaagtgtattcatcacctaatgtatcgataattatttctactccttatttggaatccagcgttactatacgcaatgttacacacatttatgatatgggtagagtttttgtccccgctccttttggaggatcgcaacaatttatttctaaatctatgagagatcaacgaaaaggaagagtaggaagagttaatcctggtacatacgtctatttctatgatctgtcttatatgaagtctatacagcgaatagattcagaatttctacataattatatattgtacgctaataagtttaatctaacactccccgaagatttgtttataatccctacaaatttggatattctatggcgtacaaaggaatatatagactcgttcgatattagtacagaaacatggaataaattattatccaattattatatgaagatgatagagtatgctaaactttatgtactaagtcctattctcgctgaggagttggataactttgagaggacgggagaattaactagtattgtacgagaagccattttatctctaaatttacaaattaagattttaaattttaaacataaagatgatgatacgtatatacacttttgtaaaatattattcggtgtctataacggaacaaacgctactatatattatcatagacctctaacgggatatatgaatatgatttcagatactatatttgttcctgtagataataactaaaaatcaaactctaatgaccacatctttttttagagatgaaaaattttccacatctccttttgtagacacgactaaacattttgcagaaaaaagtttattagtgtttagataatcgtatacttcatcagtgtagatagtaaatgtgaacagataaaaggtattcttgctcaatagattggtaaattccatagaatatattaatcctttcttcttgagatcccacatcatttcaaccagagacgttttatccaatgatttacctcgtactataccacatacaaaactagattttgcagtgacgtcgtacctggtattcctaccaaacaaaattttacttttagttcttttagaaaattctaaggtagaatctctatttgccaatatgtcatctatggaattaccactagcaaaaaatgatagaaatatatattgatacatcgcagctggttttgatctactatactttaaaaacgaatcagattccataattgcctgtatatcatcagctgaaaaactatgttttacacgtattccttcggcatttctttttaatgatatatcttgtttagacaatgataaagttatcatgtccatgagagacgcgtctccgtatcgtataaatatttcattagatgttagacgcttcattaggggtatacttctataaggtttcttaatcagtccatcattggttgcgtcaagaactactatcggatgttgttgggtatctctagtgttacacatggccttactaaagtttgggtaaataactatgatatctctattaattatagatgcatatatttcattcgtcaaggatattagtatcgacttgctatcgtcattaatacgtgtaatgtaatcatataaatcatgcgatagccaaggaaaatttaaatagatgttcatcatataatcgtcgctataattcatattaatacgttgacattgactaatttgtaatatagcctcgccacgaagaaagctctcgtattcagtttcatcgataaaggataccgttaaatataactggttgccgatagtctcatagtctattaagtggtaagtttcgtacaaatacagaatccctaaaatattatctaatgttggattaatctttaccataactgtataaaatggagacggagtcataactattttaccgtttgtacttactggaatagatgaaggaataatctccggacatgctggtaaagacccaaatgtctgtttgaagaaatccaatgttccaggtcctaatctcttaacaaaaattacgatattcgatcccgatatcctttgcattctatttaccagcatatcacgaactatattaagattatctatcatgtctattctcccaccgttatataaatcgcctccgctaagaaacgttagtatatccatacaatggaatacttcatttctaaaatagtattcgttttctaattctttaatgtgaaatcgtatactagaaagggaaaaattatctttgagttttccgttagaaaagaaccacgaaactaatgttctgattgcgtccgattccgttgctgaattaatggatttacaccaaaaactcatataacttctagatgtagaagcattcgctaaaaaattagtagaatcaaaggatataagtagatgttccaacaagtgagcaattcccaagatttcatctatatcattctcgaatccgaaattagaaattcccaagtagatatcctttttcatccgatcgttgatgaaaatacgaactttattcggtaagacaatcatttactaaggagtaaaataggaagtaatgttcgtatgtcgttatcatcgtataaattaaaggtgtgttttttaccattaagtgacattataattttaccaatattggaattataatataggtgtatttgcgcactcgcgacggttgatgcatcggtaaatatagctgtatctaatgttctagtcggtatttcatcatttcgctgtctaataatagcgttttctctatctgtttccattacagctgcctgaagtttattggtcggataatatgtaaaataataagaaatacatacgaataacaaaaataaaataagatataataaagatgccatttagagatctaattttgtttaacttgtccaaattcctacttacagaagatgaggaatcgttggagatagtgtcttccttatgtagaggatttgaaatatcttataatgacttgataacttactttccagataggaaataccataaatatatttataaagtatttgaacatgtagatttatcggaggaattaagtatggaattccatgatacaactctgagagatttagtctatcttagattgtacaagtattccaagtgtatacggccgtgttataaattaggagataatctaaaaggcatagttgttataaaggacaggaatatttatattagggaagcaaatgatgacttgatagaatatctcctcaaggaatacactcctcagatttatacatattctaatgagcgcgtccccataactggttcaaaattaattctttgtggattttctcaagttacatttatggcgtatacaacgtcgcatataacaacaaataaaaaggtagatgttctcgtttccaaaaaatgtatagatgaactagtcgatccaataaattatcaaatacttcaaaatttatttgataaaggaagcggaacaataaacaaaatactcaggaagatattttattcggtaacaggtggccaaactccataggtagctttttctatttcggattttagaatttccaaattcaccagcgatttatcggttttggtgaaatccaaggatttattaatgtccacaaatgccatttgttttgtctgtggattgtatttgaaaatggaaacgatgtagttagatagatgcgctgcgaagtttcctattagggttccgcgcttcacgtcacccagcatacttgaatcaccatcctttaaaaaaaatgataagatatcaacatggagtatatcatactcgaattttaattcttctactgactcactgacattttcacaaatactacaatacggtttaccgaaaataatcagtacgttcttcatttatgggtatcaaaaacttaaaatcgttactgctggaaaataaatcactgacgatattagatgataatttatacaaagtatacaatggaatatttgtggatacaatgagtatttatatagccgtcgccaattgtgtcagaaacttagaagagttaactacggtattcataaaatacgtaaacggatgggtaaaaaagggagggcatgtaaccctttttatcgatagaggaagtataaaaattaaacaagacgttagagacaagagacgtaaatattctaaattaaccaaggacagaaaaatgttagaattagaaaagtgtacatccgaaatacaaaatgttaccggatttatggaagaagaaataaaggcagaaatgcaattaaaaatcgataaactcacatttcaaatatatttatctgattctgataacataaaaatatcattgaatgagatactaacacatttcaacaataatgagaatgttacattattttattgtgatgaacgagacgcagaattcgttatgtgtctcgaggctaaaacacatttctctaccacaggagaatggccgttgataataagtaccgatcaggatactatgctatttgcatctgctgataatcatcctaagatgataaaaaacttaactcaactgtttaaatttgttccctcggcagaggataactatttagcaaaattaacggcgttagtgaatggatgtgatttctttcctggactctatggggcatctataacacccaccaacttaaacaaaatacaattgtttagtgattttacaatcgataatatagtcactagtttggcaattaaaaattattatagaaagactaactctaccgtagacgtgcgtaatattgttacgtttataaacgattacgctaatttagacgatgtctactcgtatattcctccttgtcaatgcactgttcaagaatttatattttccgcattagatgaaaaatggaatgaatttaaatcatcttatttagaaagcgtgccgttaccctgccaattaatgtacgcgttagaaccacgcaaggagattgatgtttcagaagttaaaactttatcatcttatatagatttcgaaaatactaaatcagatatcgatgttataaaatctatatcctcgatcttcggatattctaacgaaaactgtaacacgatagtattcggcatctataaggataatttactactgagtataaataattcattttactttaacgatagtctgttaataaccaatactaaaagtgataatataataaatataggttactagattaaaaatggtgttccaactcgtgtgctctacatgcggtaaagatatttctcacgaacgatataaattgattatacgaaaaaaatcattaaaggatgtactcgtcagtgtaaagaacgaatgttgtaggttaaaattatctacacaaatagaacctcaacgtaacttaacagtgcaacctctattggatataaactaatatggatccggttaattttatcaagacatatgcgcctagaggttctattatttttattaattataccatgtcattaacaagtcatttgaatccatcgatagaaaaacatgtgggtatttattatggtacgttattatcggaacacttggtagttgaatctacctatagaaaaggagttcgaatagtcccattggatagtttttttgaaggatatcttagtgcaaaagtatacatgttagagaatattcaagttatgaaaatagcagctgatacgtcattaactttattgggtattccgtatggatttggtcatgatagaatgtattgttttaaattggtagctgactgttataaaaatgccggtattgatacatcgtctaaacgaatattgggcaaagatatttttctgagccaaaacttcacagacgataatagatggataaagatatatgattctaataatttaacattttggcaaattgattaccttaaagggtgagttaatatgcataactactcctccgttgttttttccctcgttctttttcttaacgttgtttgccatcactctcataatgtaaagatattctaaaatggtaaacttttgcatatcggacgcagaaattggtataaatgttgtaattgtattatttcccgtcaatggactagtcacagctccatcagttttatatcctttagagtatttctcactcgtgtctaacattctagagcattccatgatctgtttatcgttgatattggccggaaagatagattttttattttttattatattactattggcaattgtagatataacttctggtaaatatttttctaccttttcaatctcttctattttcaagccggctatatattctgctatattgttgctagtatcaataccttttctggctaagaagtcatatgtggtattcactatatcagttttaactggtagttccattagcctttccacttctgcagaataatcagaaattggttctttaccagaaaatccagctactataataggctcaccgatgatcattggcaaaatcctatattgtaccagattaatgagagcatatttcatttccaataattctgctagttcttgagacattgatttatttgatgaatctagttggttctctagatactctaccatttctgccgcatacaataacttgttagataaaatcagggttatcaaagtgtttagcgtggctagaatagtgggcttgcatgtattaaagaatgcggtagtatgagtaaaccgttttaacgaattatatagtctccagaaatctgtggcgttacatacatgagccgaatgacatcgaagattgtccaatatttttaatagctgctctttgtccattatttctatatttgactcgcaacaattgtagataccattaatcaccgattcctttttcgatgccggacaatagcacaattgtttagctttggactctatgtattcagaattaatagatatatctctcaatacagattgcactatacattttgaaactatgtcaaaaattgtagaacgacgctgttctgcagccatttaactttaaataatttacaaaaatttaaaatgagcatccgtataaaaatcgataaactgcgccaaattgtggcatatttttcagagttcagtgaagaagtgtctataaatgtagactcgacggatgagttaatgtatatttttgccgccttgggcggatctgtaaacatttgggcaattatacctctaagtgcatcagtgttttaccgaggagccgaaaatattgtgtttaatcttcctgtgtccaaggtaaaatcgtgtttgtgtagttttcacaatgatgccatcatagatatagaacctgatctggaaaataatctagtaaaactttctagttatcatgtagtaagtgtcgattgtaacaaggaactgatgcctattaggacagatactactatttgtctaagtatagatcaaaagaaatcttacgtgtttaattttcacaagtatgaagaaaaatgttgtggtagaaccgtcattcatctagaatggttgttgggctttatcaagtgtattagtcagcatcagcatctggctattatgtttaaagatgacaatattattatgaagactcctggtaatactgatgcgttttccagggaatattctatgactgaatgttctcaagaactacaaaagttttctttcaaaatagctatctcgtctctcaacaaactacgaggattcaaaaagagagtcaatgtttttgaaactagaatcgtaatggataatgacgataacattttaggaatgttgttttcggatagagttcaatcctttaagatcaacatctttatggcgtttttagattaatactttcaatgagataaatatgggtggcggagtaagtgttgagctccctaaacgggatccgcctccgggagtacccactgatgagatgttattaaacgtggataaaatgcatgacgtgatagctcccgctaagcttttagaatatgtgcatataggaccactagcaaaagataaagaggataaagtaaagaaaagatatccagagtttagattagtcaacacaggacccggtggtctttcggcattgttaagacaatcgtataatggaaccgcacccaattgctgtcgcacttttaatcgtactcattattggaagaaggatggaaagatatcagataagtatgaagagggtgcagtattagaatcgtgttggccagacgttcacgacactggaaaatgcgatgttgatttattcgactggtgtcagggggatacgttcgatagaaacatatgccatcagtggatcggttcagcctttaataggagtaatagaactgtagagggtcaacaatcgttaataaatctgtataataagatgcaaacattatgtagtaaagatgctagtgtaccaatatgcgaatcatttttgcattatttacgcgcacacaatacagaagatagcaaagagatgatcgattatattctaagacaacagtctgcggactttaaacagaaatatatgagatgtagttatcccactagagataagttagaagagtcattaaaatatgcggaacctcgagaatgttgggatccagagtgttcgaatgccaatgttaatttcttactaacacgtaattataataatttaggactttgcaatattgtacgatgtaataccagcgtgaacaacttacagatggataaaacttcctcattaagattgtcatgtggattaagcaatagtgatagattttctactgttcccgtcaatagagcaaaagtagttcaacataatattaaacactcgttcgacctaaaattgcatttgatcagtttattatctctcttggtaatatggatactaattgtagctatttaaatgggtgccgcggcaagcatacagacgacggtgaatacactcagcgaacgtatctcgtctaaattagaacaagaagcgaacgctagtgctcaaacaaaatgtgatatagaaatcggaaatttttatatccgacaaaaccatggatgtaacctcactgttaaaaatatgtgctctgcggacgcggatgctcagttggatgctgtgttatcagccgctacagaaacatatagtggattaacaccggaacaaaaagcatacgtgccagctatgtttactgctgcgttaaacattcagacgagtgtaaacactgttgttagagattttgaaaattatgtgaaacagacttgtaattctagcgcggtcgtcgataacaaattaaagatacaaaacgtaatcatagatgaatgttacggagccccaggatctccaacaaatttggaatttattaatacaggatctagcaaaggaaattgtgccattaaagcgttgatgcaattgacgactaaggccactactcaaatagcacctagacaagttgctggtacaggagttcagttttatatgattgttatcggtgttataatattggcagcgttgtttatgtactatgccaagcgtatgttgttcacatccaccaatgataaaatcaaacttattttagccaataaggaaaacgtccattggactacttacatggacacattctttagaacttctccgatggttattgctaccacggatatgcaaaactgaaaatatattgataatattttaatagattaacatggaagttatcgctgatcgtctagacgatatagtgaaacaaaatatagcggatgaaaaatttgtagattttgttatacacggtctagagcatcaatgtcctgctatacttcgaccattaattaggttgtttattgatatactattatttgttatagtaatttatatttttacggtacgtctagtaagtagaaattatcaaatgttgttggtggtgctagtcatcacattaactattttttattactttatactataatagtactagactgacttctaacaaacatctcacctgccataaataaatgcttgatattaaagtcttctatttctaacactattccatctgtggaaaataatactctgacattatcgctaattgacacatcggtgagtgatatgcctataaagtaataatcttctttgggcacatataccagtgtaccaggttctaacaacctatttactggtgctcctgtagcatactttttctttaccttgagaatatccatcgtttgcttggtcaatagcgatatgtgattttttatcaaccactcaaaaaagtaattggagtgttcatatcctctacgggctattgtctcatggccgtgtatgaaatttaagtaacacgactgtggtagatttgttctatagagccgattgccgcaaatagatagaactaccaatatgtctgtacaaatgttaaacattaattgattaacagaaaaaacaatgttcgttctgggaatagaaaccagatcaaaacaaaattcgttagaatatatgccacgtttatacatggaatataaaataactacagtttgaaaaataacagtatcatttaaacatttaacttgcggggttaatctcacaactttactgtttttgaactgttcaaaatatagcatcgatccgtgagaaatacgtttagccgcctttaatagaggaaatcccaccgcctttctggatctcaccaacgacgatagttctgaccagcaactcatttcttcatcatccacctgttttaacatataataggcaggagatagatatccgtcattgcaatattccttctcgtaggcacacaatctaatattgataaaatctccattctcttctctgcatttattatcttgtctcggtggctgattaggctgtggtcttggtttaggccttggtctatcgttgttgaatctattttggtcattaaatctttcatttcttcctggtatatttctatcacctcgtttggttggatttttgtctatattatcgtttgtaacatcggtacgggtattcatttatcacaaaaaaaacttctctaaatgagtctactgctagaaaacctcatcgaagaagataccatattttttgcaggaagtatatctgagtatgatgatttacaaatggttattgccggcgcaaaatccaaatttccaagatctatgctttctatttttaatatagtacctagaacgatgtcaaaatatgagttggagttgattcataacgaaaatatcacaggagcaatgtttaccacaatgtataatataagaaacaatttgggtctaggagatgataaactaactattgaagccattgaaaactatttcttggatcctaacaatgaagttatgcctcttattattaataatacggatatgactgccgtcattcctaaaaaaagtggtaggagaaagaataagaacatggttatcttccgtcaaggatcatcacctatcttgtgcattttcgaaactcgtaaaaagattaatatttataaagaaaatatggaatccgcgtcgactgagtatacacctatcggagacaacaaggctttgatatctaaatatgcgggaattaatgtcctgaatgtgtattctccttccacatccataagattgaatgccatttacggattcaccaataaaaataaactagagaaacttagtactaataaggaactagaatcgtatagttctagccctcttcaagaacccattaggttaaatgattttctgggactattggaatgtgttaaaaagaatattcctctaacagatattccgacaaaggattgattactataaatggagaatgttcctaatgtatactttaatcctgtgtttatagagcccacgtttaaacattctttattaagtgtttataaacacagattaatagttttatttgaagtattcgttgtattcattctaatatatgtattttttagatctgaattaaatatgttcttcatgcctaaacgaaaaatacccgatcctattgatagattacgacgtgctaatctagcgtgtgaagacgataaattaatgatctatggattaccatggatgacaactcaaacatctgcgttatcaataaatagtaaaccgatagtgtataaagattgtgcaaagcttttgcgatcaataaatggatcacaaccagtatctcttaacgatgttcttcgcagatgatgattcattttttaagtatttggctagtcaagatgatgaatcttcattatctgatatattgcaaatcactcaatatctagactttctgttattattattgatccaatcaaaaaataaattagaagctgtgggtcattgttatgaatctctttcagaggaatacagacaattgacaaaattcacagactttcaagattttaaaaaactgtttaacaaggtccctattgttacagatggaagggtcaaacttaataaaggatatttgttcgactttgtgattagtttgatgcgattcaaaaaagaatcctctctagctaccaccgcaatagatcctgttagatacatagatcctcgtcgcaatatcgcattttctaacgtgatggatatattaaagtcgaataaagtgaacaataattaattctttattgtcatcatgaacggcggacatattcagttgataatcggccccatgttttcaggtaaaagtacagaattaattagacgagttagacgttatcaaatagctcaatataaatgcgtgactataaaatattctaacgataatagatacggaacgggactatggacgcatgataagaataattttgaagcattggaagcaactaaactatgtgatgtcttggaatcaattacagatttctccgtgataggtatcgatgaaggacagttctttccagacattgtttaattctgtgagcgtatggcaaacggtaccgagctcaaaaattgaaaaactagcgtctttttttgctcgaagtcgaccaccatgagtgctcctaaactcctctctctgggctgtatcttcttccccttgctactttttcagcaggcccgggctcaattcccaagacagtgtgccactgttgaggctttgagaagtggtatgtgttgcccagacctgtcccctgtgtctgggcctgggacagaccgctgtggctcatcatcagggaggggcagatgtgaggcagtgactgcagactcccggccccacagccctcagtatccccatgatggcagagatgatcgggaggtctggcccttgcgcttcttcaataggacatgtcactgcaacggcaatttctcaggacacaactgtgggacgtgccgtcctggctggagaggagctgcctgtgaccagagggttctcatagtcaggagaaatcttctggacttaagtaaagaagaaaagaaccactttgtccgggccctggatatggcaaagcgcacaactcaccctttatttgtcattgccaccaggagatcagaagaaatactggggccagatggcaacacgccacaatttgagaacatttccatttataactactttgtttggacacactattactcagtcaaaaagactttccttggggtaggacaggaaagctttggtgaagtggatttctctcatgagggaccagcttttctcacatggcacaggtaccacctcctgcgtctggagaaagacatgcaggaaatgttgcaagagccttctttctcccttccttactggaattttgcaacggggaaaaatgtctgtgatatctgcacggatgacttgatgggatccagaagcaactttgattccactctaataagcccaaactctgtcttttctcaatggcgagtggtctgtgactccttggaagattatgataccctgggaacactttgtaacagcaccgaggatgggccaattaggagaaatccagctggaaatgtggccagaccaatggtgcaacgtcttcctgaaccacaggatgtcgctcagtgcttggaagttggtttatttgacacgcctcctttttattccaactctacaaacagtttccgaaacacagtggaaggttacagtgaccccacgggaaagtatgaccctgctgttcgaagtcttcacaatttggctcatctattcctgaatggaacagggggacaaacccatttgtctccaaatgatcctatttttgtcctcctgcacaccttcacagatgcagtctttgatgaatggctgaggagatacaatgctgatatatccacatttccattggaaaatgcccctattggacataatagacaatacaacatggtgccattctggcccccagtcaccaacacagaaatgtttgttactgctccagacaacctgggatacacttatgaaattcaatggccaagtcgggagtttagtgtacctgagataattgccatagcagtagttggcgctttgttactggttgcactcatttttgggactgcttcttatctgattcgtgccagacgcagtatggatgaagctaaccagcctctcctcactgatcagtatcaatgctatgctgaagaatatgaaaaactccagaatcctaatcagtctgtggtctaattaattaattaatttttatcgatctaattcaacaatgtctggagagctcggtttggaattagtgaaagcttaaaaattgaaattttattttttttttttggaatataaataagctcgaagtcgaccaccatgttcttggctgttttgtattgccttctgtggagtttccagatctctgatggccattttcctcgagcctgtgcctcctctaagaacttgttggcaaaagaatgctgcccaccatggatgggtgatgggagtccctgcggccagctttcaggcagaggttcctgccaggatatccttctgtccagtgcaccatctggacctcagttccccttcaaaggggtggatgaccgtgagtcctggccctctgtgttttataataggacctgccagtgctcaggcaacttcatgggtttcaactgcggaaactgtaagtttggatttgggggcccaaattgtacagagaagcgagtcttgattagaagaaacatttttgatttgagtgtctccgaaaagaataagttcttttcttacctcactttagcaaaacatactatcagctcagtctatgtcatccccacaggcacctatggccaaatgaacaatgggtcaacacccatgtttaatgatatcaacatctacgacctctttgtatggatgcattactatgtgtcaagggacacactgcttgggggctctgaaatatggagggacattgattttgcccatgaagcaccagggtttctgccttggcacagacttttcttgttattgtgggaacaagaaattcgagaactaactggggatgagaacttcactgttccatactgggattggagagatgcagaaaactgtgacatttgcacagatgagtacttgggaggtcgtcaccctgaaaatcctaacttactcagcccagcatccttcttctcctcctggcagatcatttgtagcagatcagaagagtataatagccatcaggttttatgcgatggaacacctgagggaccactattacgtaatcctggaaaccatgacaaagccaaaacccccaggctcccatcttcagcagatgtggaattttgtctgagtttgacccagtatgaatctggatcaatggatagaactgccaatttcagctttagaaacacactggaaggatttgccagtccactcacagggatagcagatccttctcaaagtagcatgcacaatgccttacatatctttatgaatggaacaatgtcccaagtacagggatcggccaacgatcccatttttcttcttcaccatgcttttgtggacagtatttttgaacaatggctgcgaaggcaccgccctcttttggaagtttacccagaagccaatgcacctatcggccataacagagactcttacatggttcctttcataccgctctatagaaatggtgatttcttcataacatccaaggatctgggatatgactacagctacctccaagagtcagatccaggcttttacagaaattatattgagccttacttggaacaagccagtcgtatctggccatggcttcttggggcagcactggtgggagctgttattgctgcagctctctctgggcttagcagtaggctatgccttcagaagaagaagaagaagaagcaaccccaggaggaaaggcagccactcctcatggacaaagacgactaccacagcttgctgtatcagagccatctgtgattaattaatttttatcgatctaattcaacaatgtctggagagctcggatccttctgtgagcgtatggcaaacgaaggaaaaatagttatagtagccgcactcgatgggacatttcaacgtaaaccgtttaataatattttgaatcttattccattatctgaaatggtggtaaaactaactgctgtgtgtatgaaatgctttaaggaggcttccttttctaaacgattgggtgaggaaaccgagataaaccgagatagaaataataggaggtaatgatatgtatcaatcggtgtgtagaaagtgttacatcgactcataatattatattttttatctaaaaaactaaaaataaacattgattaaattttaatataatacttaaaaatggatgttgtgtcgttagataaaccgtttatgtattttgaggaaattgataatgagttagattacgaaccagaaagtgcaaatgaggtcgcaaaaaaactgccgtatcaaggacagttaaaactattactaggagaattattttttcttagtaagttacagcgacacggtatattagatggtgccaccgtagtgtatataggatctgctcccggtacacatatacgttatttgagagatcatttctataatttaggagtgatcatcaaatggatgctaattgacggccgccatcatgatcctattttaaatggattgcgtgatgtgactctagtgactcggttcgttgatgaggaatatctacgatccatcaaaaaacaactgcatccttctaagattattttaatttctgatgtgagatccaaacgaggaggaaatgaacctagtacggcggatttactaagtaattacgctctacaaaatgtcatgattagtattttaaaccccgtggcgtctagtcttaaatggagatgcccgtttccagatcaatggatcaaggacttttatatcccacacggtaataaaatgttacaaccttttgctccttcatattcagctgaaatgagattattaagtatttataccggtgagaacatgagactgactcgagttaccaaattagacgctgtaaattatgaaaaaaagatgtactaccttaataagatcgtccgtaacaaagtagttgttaactttgattatcctaatcaggaatatgactattttcacatgtactttatgctgaggaccgtgtactgcaataaaacatttcctactactaaagcaaaggtactatttctacaacaatctatatttcgtttcttaaatattccaacaacatcaactgaaaaagttagtcatgaaccaatacaacgtaaaatatctagcaaaaattctatgtctaaaaacagaaatagcaagagatccgtacgcggtaataaatagaaacgtactactgagatatactaccgatatagagtataatgatttagttactttaataaccgttagacataaaattgattctatgaaaactgtgtttcaggtatttaacgaatcatccataaattatactccggttgatgatgattatggagaaccaatcattataacatcgtatcttcaaaaaggtcataacaagtttcctgtaaattttctatacatagatgtggtaatatctgacttatttcctagctttgttagactagatactacagaaactaatatagttaatagtgtactacaaacaggcgatggtaaaaagactcttcgtcttcccaaaatgttagagacggaaatagttgtcaagattctctatcgccctaatataccattaaaaattgttagatttttccgcaataacatggtaactggagtagagatagccgatagatctgttatttcagtcgctgattaatcaattagtagagatgagataagaacattataataatcaataatatatcttatatcttatatcttatatcttatatcttgtttagaaaaatgctaatattaaaatagctaacgctagtaatccaatcggaagccatttgatatctataatagggtatctaatttcctgatttaaatagcggacagctatattctcggtagctactcgtttggaatcacaaacattatttacatctaatttactatctgtaatggaaacgtttcccaatgaaatggtacaatccgatacattgcattttgttatatttttttttaaagaggctggtaacaacgcatcgcttcgtttacatggctcgtaccaacaataatagggtaatcttgtatctattcctatccgtactatgcttttatcaggataaatacatttacatcgtatatcgtctttgttagcatcacagaatgcataaatttgttcgtccgtcatgataaaaatttaaagtgtaaatataactattatttttatagttgtaataaaaagggaaatttgattgtatactttcggttctttaaaagaaactgacttgataaaaatggctgtaatctctaaggttacgtatagtctatatgatcaaaaagagattaatgctacagatattatcattagtcatgttaaaaatgacgacgatatcggtaccgttaaagatggtagactaggtgctatggatggggcattatgtaagacttgtgggaaaacggaattggaatgtttcggtcactggggtaaagtaagtatttataaaactcatatagttaagcctgaatttatttcagaaattattcgtttactgaatcatatatgtattcactgcggattattgcgttcacgagaaccgtattccgacgatattaacctaaaagagttatcgggacacgctcttaggagattaaaggataaaatattatccaagaaaaagtcatgttggaacagtgaatgtatgcaaccgtatcaaaaaattactttttcaaagaaaaaggtttgtttcgtcaacaagttggatgatattaacgttcctaattctctcatctatcaaaagttaatttctattcatgaaaagttttggccattattagaaattcatcaatatccagctaacttattttatacagactactttcccatccctccgttgattattagaccggctattagtttttggatagatagtatacccaaagagaccaatgaattaacttacttattaggtatgatcgttaagaattgtaacttgaatgctgatgaacaggttatccagaaggcggtaatagaatacgatgatattaaaattatttctaataacactaccagtatcaatttatcatatattacatccggcaaaaataatatgattagaagttatatcgtcgcccgacgaaaagatcagaccgctagatctgtaattggtcccagtacatctatcaccgttaatgaggtaggaatgcccgcatatattagaaatacacttacagaaaagatatttgttaatgcctttacagtggataaagttaaacaactattagcgtcaaaccaagttaaattttactttaataaacgattaaaccaattaacaagaatacgccaaggaaagtttattaaaaataaaatacatttattgcctggtgattgggtagaagtagctgttcaagaatatacaagtattatttttggaagacagccgtctctacatagatacaacgtcatcgcttcatctatcagagctaccgaaggagatactatcaaaatatctcccggaattgccaactctcaaaatgctgatttcgacggggatgaggaatggatgatattagaacaaaatcctaaagctgtaattgaacaaagtattcttatgtatccgacgacgttactcaaacacgatattcatggagcccccgtttatggatctattcaagatgaaatcgtagcagcgtattcattgtttaggatacaagatctttgtttagatgaagtattgaacatcttggggaaatatggaagagagttcgatcctaaaggtaaatgtaaattcagcggtaaagatatctatacttacttgataggtgaaaagattaattatccgggtctcttaaaggatggtgaaattattgcaaacgacgtagatagtaattttgttgtggctatgaggcatctgtcattggctggactcttatccgatcataagtcgaacgtggaaggtatcaactttattatcaagtcatcttatgtttttaagagatatctatctatttacggttttggggtgacattcaaagatctgagaccaaattcgacgttcactaataaattggaggccatcaacgtagaaaaaatagaacttatcaaagaagcatacgccaaatatctcaacgatgtaagagacgggaaaatagttccattatctaaagctttagaggcggactatgtggaatccatgttatccaacttgacaaatcttaatatccgagagatagaagaacatatgagacaaacgctgatagatgatccagataataacctcctgaaaatggccaaagcgggttataaagtaaatcccacagaactaatgtatattctaggtacgtatggacaacaaaggattgatggtgaaccagcagagactcgagtattgggtagagttttaccttactatcttccagactctaaggatccagaaggaagaggttacattcttaattctttaacaaaaggattaacgggttctcaatattacttttcgatgctggttgccagatctcaatctactgatatcgtctgtgaaacatcacgtaccggaacactggctagaaaaatcattaaaaagatggaggatatggtggtcgacggatacggacaagtagttataggtaatacgctcatcaagtacgccgccaattataccaaaattctaggctcagtatgtaaacctgtagatcttatctatccagatgagtccatgacttggtatttggaaattagtgctctgtggaataaaataaaacagggattcgtttactctcagaaacagaaacttgcaaagaagacattggcgccgtttaatttcctagtattcgtcaaacccaccactgaggataatgctattaaggttaaggatctgtacgatatgattcataacgtcattgatgatgtgagagagaaatacttctttacggtatctaatatagattttatggagtatatattcttgacgcatcttaatccttctagaattagaattacaaaagaaacggctatcactatctttgaaaagttctatgaaaaactcaattatactctaggtggtggaactcctattggaattatttctgcacaggtattgtctgagaagtttacacaacaagccctgtccagttttcacactactgaaaaaagtggtgccgtcaaacaaaaacttggtttcaacgagtttaataacttgactaatttgagtaagaataagaccgaaattatcactctggtatccgatgatatctctaaacttcaatctgttaagattaatttcgaatttgtatgtttgggagaattaaatccaaacatcactcttcgaaaagaaacagataaatatgtagtagatataatagtcaatagattatacatcaagagagcagaaataaccgaattagtcgtcgaatatatgattgaacgatttatctcctttagcgtcattgtaaaggaatggggtatggagacattcattgaggacgaggataatattagatttactgtctacctaaatttcgttgaaccggaagaattgaatcttagtaagtttatgatggttcttccgggggcagccaacaagggaaagattagtaaattcaagattcctatctctgattatacgggatatgacgacttcaatcaaacaaaaaagctcaataagatgactgtagaactcatgaatctaaaagaattgggttctttcgatttggaaaacgtcaacgtgtatcctggagtatggaatacatacgatatcttcggtatcgaggccgctcgtgaatacttgtgcgaagccatgttaaacacctatggagaagggttcgattatctgtatcagccttgtgatcttctcgctagtttactatgtgctagttacgaaccagaatcagtgaataaattcaagttcggcgcagctagtactcttaagagagctacgttcggagacaataaagcattgttaaacgcggctcttcataaaaagtcagaacctattaacgataatagtagctgccacttttttagcaaggtccctaatataggaactggatattacaaatactttatcgacttgggtcttctcatgagaatggaaaggaaactatctgataagatatcttctcaaaagatcaaggaaatggaagaaacagaagacttttaattcttatcaataacatatttttctatgatctgtcttttaaacgatggattttccacaaatgcgcctctcaagtccctcatagaatgatacacgtataaaaaatatagcataggcaatgactccttatttttagacattagatatgccaaaatcatagccccgcttctatttactcccgcagcacaatgaaccaacacgggctcgtttcgttgatcacatttagataaaaaggcggttacgtcgtcaaaatatttactaatatcggtagttgtatcatctaccaacggtatatgaataatattaatattagagttaggtaatgtatatttatccatcgtcaaatttaaaacatatttgaacttaacttcagatgatggtgcatccatagcatttttataatttcccaaatacacattattggttacccttgtcattatagtgggagatttggctttgtgcatatctccagttgaacgtagtagtaagtatttatacaaacttttcttatccatttataacgtacaaatggataaaactactttatcggtaaacgcgtgtaatttagaatacgttagagaaaaggctatagtaggcgtacaagcagccaaaacatcaacacttatattctttgttattatattggcaattagtgcgctattactctggtttcagacgtctgataatccagtctttaatgaattaacgagatatatgcgaattaaaaatacggttaacgattggaaatcattaacggatagcaaaacaaaattagaaagtgatagaggtagacttctagccgctggtaaggatgatatatttgaattcaaatgtgtggatttcggcgcctattttatagctatgcgattggataagaaaacatatctgccgcaagctattaggcgaggtactggagacgcgtggatggttaaaaaggcggcaaaggtcgatccatctgctcaacaattttgtcagtatttgataaaacacaagtctaataatgttattacttgtggtaatgagatgttaaatgaattaggttatagcggttattttatgtcaccgcattggtgttccgattttagtaatatggaatagtgttagataaatgcggtaacgaatgttcctgtaaggaaccataacagcttagatttaacgttaaagatgagcataaacataataaacaaaattacaatcaaacttataacattaatatcaaacaatccaaaaaatgaaatcagtggagtagtaaacgcgtacataactcctggataacgtttagcagctgccgttcctattctagaccaaaaattcggtttcatgttttcgaaacggtattctgcaacaagtcgaggatcgtgttctacatatttggcggcattatccagtatctgcctattgatcttcatttcgttttcgattctggctatttcaaaataaaatcccgatgatagacctccagactttataatttcatctacgatgttcagcgccgtagtaactctaataatataggctgataagctaacatcataccctcctgtatatgtgaatatggcatgatttttgtccattacaagctcggttttaactttattgcctgtaataatttctctcatctgtaggatatctatttttttgtcatgcattgccttcaagacgggacgaagaaacgtaatatcctcaataacgttatcgttttctacaataactacatattctacctttttattttctaactcggtaaaaaaattagaatcccatagggctaaatgtctagcgatatttcttttcgtttcctctgtacacatagtgttacaaaaccctgaaaagaagtgagtatacttgtcatcatttctaatgtttcctccagtccactgtataaacgcataatccttgtaatgatctggatcatccttgactaccacaacatttcttttttctggcataacttcgttgtcctttacatcatcgaacttctgatcattaatatgctcatgaacattaggaaatgtttctgatggaggtctatcaataactggcacaacaataacaggagttttcaccgccgccatttagttattgaaattaatcatatacaactctttaatacgagttatattttcgtctatccattgtttcacattgacatatttcgacaaaaagatataaaatgcgtattccaatgcttctctgtttaatgaattactaaaatatacaaacacgtcactgtctggcaataaatgatatcttagaatattgtaacaatttattttgtattgcacatgttcgtgatctatgagttcttcttcgaatggcataggatctccgaatctgaaaacgtataaataggagttagaataataatatttgagagtattggtaatatataaactctttagcggtataattagtttttttctctcaatttctatttttagatgtgatggaaaaatgactaattttgtagcattagtatcatgaactctaatcaaaatcttaatatcttcgtcacacgttagctctttgaagtttttaagagatgcatcagttggttctacagatggagtaggtgcaacaattttttgttctacacatgtatgtactggagccattgttttaactataatggtgcttgtatcgaaaaactttaatgcagatagcggaagctcttcgccgcgactttctacgtcgtaattgggttctaacgccgatctctgaatggatactagttttctaagttctaatgtgattctctgaaaatgtaaatccaattcctccggcattatagatgtgtatacatcggtaaataaaactatagtatccaacgatcccttctcgcaaattctagtcttaaccaaaaaatcgtatataaccacggagatggcgtatttaagagtggattcttctaccgttttgttcttggatgtcatataggaaactataaagtccgcactactgttaagaatgattactaacgcaactatatagtttaaattaagcattttggaaacataaaataactctgtagacgatacttgactttcgaataagtttgcagacaaacgaagaaagaacagacctctcttaatttcagaagaaaactttttttcgtattcctgacgtctagagtttatatcaataagaaagttaagaattagtcggttaatgttgtatttcattacccaagtttgagatttcataatattatcaaaagacatgataatattaaagataaagcgctgactatgaacgaaatagctatatggttcgctcaagaatatagtcttgttaaacgtggaaacgataactgtatttttaatcacgtcagcggcatctaaattaaatataggtatatttattccacacactctacaatatgccacaccatcttcataataaataaattcgttagcaaaattattaattttagtgaaatagttagcgtcaactttcatagcttccttcaatctaatttgatgctcacacggtgcgaattccactctaacatcccttttccatgcctcaggttcatcgatctctataatatctagttttttgcgtttcacaaacacaggctcgtctctcgcgatgagatctgtatagtaactatgtaaatgataactagatagaaagatgtagctatatagatgacgatcctttaagagaggtataataactttaccccaatcagatagactgttgttatggtcttcggaaaaagaatttttataaatttttccagtattttccaaatatacgtacttaacatctaaaaaatccttaatgataataggaatggataatccgtctattttataaagaaatacatatcgcacattatacttttttttggaaatgggaataccgatgtgtctacataaatatgcaaagtctaaatattttttagagaatcttagttggtccaaattcttttccaagtacggtaatagatttttcatattgaacggtatcttcttaatctctggttctagttccgcattaaatgatgaaactaagtcactatttttataactaacgattacatcacctctaacatcatcatttaccagaatactgatcttcttttgtcgtaaatacatgtctaatgtgttaaaaaaaagatcatacaagttatacgtcatttcatctgtggtattcttgtcattgaaggataaactcgtactaatctcttctttaacagcctgttcaaatttatatcctatatacgaaaaaatagcaaccagtgtttgatcatccgcgtcaatattctgttctatcgtagtgtataacaatcgtatatcttcttctgtgatagtcgatacgttataaaggttgataacgaaaatatttttatttcgtgaaataaagtcatcgtaggattttggacttatattcgcgtctagtagatatgcttttatttttggaatgatctcaattagaatagtctctttagagtccatttaaagttacaaacaactaggaaattggtttatgatgtataatttttttagtttttatagattctttattctatacttaaaaaatgaaaataaatacaaaggttcttgagggttgtgttaaattgaaagcgagaaataatcataaattatttcattatcgcgatatccgttaagtttgtatcgtaatggcgtggtcaattacgaataaagcggatactagtagcttcacaaagatggctgaaatcagagctcatctaaaaaatagcgctgaaaataaagataaaaacgaggatattttcccggaagatgtaataattccatctactaagcccaaaaccaaacgagccactactcctcgtaaaccagcggctactaaaagatcaaccaaaaaggaggaagtggaagaagaagtagttatagaggaatatcatcaaacaactgaaaaaaattctccatctcctggagtcagcgacattgtagaaagcgtggccgctgtagagctcgatgatagcgacggggatgatgaacctatggtacaagttgaagctggtaaagtaaatcatagtgctagaagcgatctctctgacctaaaggtggctaccgacaatatcgttaaagatcttaagaaaattattactagaatctctgcagtatcgacggttctagaggatgttcaagcagctggtatctctagacaatttacttctatgactaaagctattacaacactatctgatctagtcaccgagggaaaatctaaagttgttcgtaaaaaagttaaaacttgtaagaagtaaatgcgtgcacttttttataaagatggtaaactctttaccgataataattttttaaatcctgtatcagacgataatccagcgtatgaggttttgcaacatgttaaaattcctactcatttaacagatgtagtagtatatgaacaaacgtgggaggaggcgttaactagattaatttttgtgggaagtgattcaaaaggacgtagacaatacttttacggaaaaatgcatgtacagaatcgcaacgctaaaagagatcgtatttttgttagagtatataacgttatgaaacgaattaattgttttataaacaaaaatataaagaaatcgtccacagattccaattatcagttggcggtttttatgttaatggaaactatgttttttattagatttggtaaaatgaaatatcttaaggagaatgaaacagtagggttattaacactaaaaaataaacacatagaaataagtcccgatgaaatagttatcaagtttgtaggaaaggacaaagtttcacatgaatttgttgttcataagtctaatagactatataaaccgctattgaaactgacggatgattctagtcccgaagaatttctgttcaacaaactaagtgaacgaaaggtatacgaatgtatcaaacagtttggtattagaatcaaggatctccgaacgtatggagtcaattatacgtttttatataatttttggacaaatgtaaagtccatatctcctcttccgtcaccaaaaaagttaatagcattaactatcaaacaaactgctgaagtggtaggtcatactccatcaatttcaaaaagagcttatatggcaacgactattttagaaatggtaaaggataaaaattttttagatgtagtatctaaaactacgttcgatgaattcctatctatagtcgtagatcacgttaaatcatctacggatggatgatatagatctttacacaaataattacaagaccgataaatggaaatggataagcgtatgaaatctctcgcaatgacagctttcttcggagagctaagcacattagatattatggcattgataatgtctatatttaaacgccatccaaacaataccattttttcagtggataaggatggtcagtttatgattgatttcgaatacgataattataaggcttctcaatatttggatctgaccctcactccgatatctggagatgaatgcaagactcacgcatcgagtatagccgaacaattggcgtgtgcggatattattaaagaggatattagcgaatatatcaaaactactccccgtcttaaacgatttataaaaaaataccgcaatagatcagatactcgtatcagtcgagatacagaaaagcttaaaatagctctagctaaaggcatagattacgaatatataaaagacgcttgttaataagtaaatgaaaaaaaactagtcgtttataataaaacacgatatggatgccaacgtagtatcattttctactattgcgacgtatatagacgctttagcgaagaatgcttcggaattagaacagaggtctaccgcatacgaaataaataatgaattggaactagtatttattaagccgccattgattactttgacaaatgtagtgaatatctctacgattcaggaatcgtttattcgatttaccgttactaataaggaaggtgttaaaattagaactaagattccattatctaaggtacatggtctagatgtaaaaaatgtacagttagtagatgctatagataacatagtttgggaaaagaaatcattagtgacggaaaatcgtcttcacaaagaatgcttgttgagactatcgacagaggaacgtcatatatttttggattacaagaaatatggatcctctatccgactagaattagtcaatcttattcaagcaaaaacaaaaaactttacgatagactttaagctaaaatattttctaggatccggtgcccagtctaaaagttctttgttgcacgctattaatcatccaaagtcaaggcctaatacatctctggaaatagaattcacacctagagacaatgaaacagttccatatgatgaactaataaaggaattgacgactctctcgcgtcatatatttatggcttctccagagaatgtaattctttctccgcctattaacgcgcctataaaaacctttatgttgcctaaacaagatatagtaggtttggatctggaaaatctatatgccgtaactaagactgacggcattcctataactatcagagttacatcaaacgggttgtattgttattttacacatcttggttatattattagatatcctgttaagagaataatagattccgaagtagtagtctttggtgaggcagttaaggataagaactggaccgtatatctcattaagctaatagagcctgtgaatgcaatcaatgatagactagaagaaagtaagtatgttgaatctaaactagtggatatttgtgatcggatagtattcaagtcaaagaaatacgaaggtccgtttactacaactagtgaagtcgtcgatatgttatctacatatttaccaaagcaaccagaaggtgttattctgttctattcaaagggacctaaatctaacattgattttaaaattaaaaaggaaaatactatagaccaaactgcaaatgtagtatttaggtacatgtccagtgaaccaattatctttggagaatcgtctatctttgtagagtataagaaatttagcaacgataaaggctttcctaaagaatatggttctggtaagattgtgttatataacggcgttaattatctaaataatatctattgtttggaatatattaatacacataatgaagtgggtattaagtccgtggttgtacctattaagtttatagcagaattcttagttaatggagaaatacttaaacctagaattgataaaaccatgaaatatattaactcagaagattattatggaaatcaacataatatcatagtcgaacatttaagagatcaaagcatcaaaataggagatatctttaacgaggataaactatcggatgtgggacatcaatacgccaataatgataaatttagattaaatccagaagttagttattttacgaataaacgaactagaggaccgttgggaattttatcaaactacgtcaagactcttcttatttctatgtattgttccaaaacatttttagacgattccaacaaacgaaaggtattggcgattgattttggaaacggtgctgacctggaaaaatacttttatggagagattgcgttattggtagcgacggatccggatgctgatgctatagctagaggaaatgaaagatacaacaaattaaactctggaattaaaaccaagtactacaaatttgactacattcaggaaactattcgatccgatacatttgtctctagtgtcagagaagtattctattttggaaagtttaatatcatcgactggcagtttgctatccattattcttttcatccgagacattatgctaccgtcatgaataacttatccgaactaactgcttctggaggcaaggtattaatcactaccatggacggagacaaattatcaaaattaacagataaaaagacttttataattcataagaatttacctagtagcgaaaactatatgtctgtagaaaaaatagctgatgatagaatagtggtatataatccatcaacaatgtctactccaatgactgaatacattatcaaaaagaacgatatagtcagagtgtttaacgaatacggatttgttcttgtagataacgttgatttcgctacaattatagaacgaagtaaaaagtttattaatggcgcatctacaatggaagatagaccgtctacaaaaaactttttcgaactaaatagaggagccattaaatgtgaaggtttagatgtcgaagacttacttagttactatgttgtttatgtcttttctaagcggtaaataataatatggtatgggttctgatctcccagttctaaatgcattaaataattccaatagagcgatttttgttcctataggaccttccaactgtggatactctgtattgttaatagatatattaatacttttgtcgggtaacagaggttctacgtcttctaaaaataaaagttttataacatctggcctgttcataaataaaaacttggcgattctatatatactcttattatcaaatctagccattgtcttatagatgtgagctactgtaggtgtaccatttgattttctttctaatactatatatttctctcgaagaagttcttgcacatcatctgggaataaaatactactgttgagtaaatcagttattttttttatatcgatattgatggacatttttatagttaaggataataagtatcccaaagtcgataacgacgataacgaagtatttatacttttaggaaatcacaatgactttatcagattaaaattaacaaaattaaaggagcatgtatttttttctgaatatattgtgactccagatacatatggatctttatgcgtcgaattaaatgggtctagttttcagcacggcggtagatatatagaggtggaggaatttatagatgctggaagacaagttagatggtgttctacatccaatcatatatctaaagatatacccgaagatatgcacactgataaatttgtcatttatgatatttatacgtttgattcgttcaagaataaacgattggtattcgtacaggtacctccgtcgttaggagatgatagtcatttgactaatccgttattgtcaccgtattatcgtaattcagtagccagacaaatggtcaatgatatgatttttaatcaagattcatttttaaaatatttattagaacatctgattagaagccactatagagtttctaaacatataacaatagttagatacaaggataccgaagaattaaatctaacgagaatatgttataatagagataagtttaaggcgtttgtattcgcttggtttaacggcgtttcggaaaatgaaaaggtactagatacgtataaaaaggtatctaatttgatataatgaattcagtgactgtatcacacgcgccatatactattacttatcacgatgattgggaaccagtaatgagtcaattggtagagttttataacgaagtagccagttggctgctacgagacgagacgtcgcctattcctgataagttctttatacagttgaaacaaccgcttagaaataaacgagtatgtgtgtgtggtatagatccgtatccgaaagatggaactggtgtaccgttcgaatcaccaaattttacaaaaaaatcaattaaggagatagcttcatctatatctagattaaccggagtaattgattataaaggttataaccttaatataatagacggggttataccctggaattattacttaagttgtaaattaggagaaacaaaaagtcacgcgatttactgggataagatttccaagttactgctgcagcatataactaaacacgttagtgttctttattgtttgggtaaaacagatttctcgaatatacgggccaagttagaatccccggtaactaccatagtcggatatcatccagcggctagagaccgccaattcgagaaagatagatcatttgaaattatcaacgttttactggaattagacaacaaggcacctataaattgggctcaagggtttatttattaatgctttagtgaaattttaacttgtgttctaaatggatgcggctattagaggtaatgatgttatctttgttcttaagactataggtgtcccgtcagcgtgcagacaaaatgaagatccaagatttgtagaagcatttaaatgcgacgagttagaaagatatattgagaataatccagaatgtacactattcgaaagtcttagggatgaggaagcatactctatagtcagaattttcatggatgtagatttagacgcgtgtctagacgaaatagattatttaacggccattcaagattttattatcgaggtgtcaaactgtgtagctagattcgcgtttacagaatgcggcgccattcatgaaaatgtaataaaatccatgagatctaatttttcattgactaagtctacaaatagagataaaacaagttttcatattatctttttagatacgtataccactatggatacattgatagctatgaaacgaacactattagaattaagtagatcatctgaaaatccactaaccagatcgatagacactgccgtatataggagaaaaacaactcttcgggttgtaggtactaggaaaaatccaaattgcgacactattcatgtaatgcaaccaccgcatgataatatagaagattacctattcacttacgtggatatgaacaacaatagttattacttttctctacaacaacgattggaggatttagttcctgataagttatgggaaccagggtttatttcattcgaagacgctataaaaagagtttcaaaaatattcattaattctataataaactttaatgatctcgatgaaaataattttacaacggtaccactggtcatagattacgtaacaccttgtgcattatgtaaaaaacgatcgcataaacatccgcatcaactatcgttggaaaatggtgctattagaatttacaaaactggtaatccacatagttgtaaagttaaaattgttccgttggatggtaataaactgtttaatattgcacaaagaattttagacactaactctgttttattaaccgaacgaggagaccatatagtttggattaataattcatggaaatttaacagcgaagaacccttgataacaaaactaattttgtcaataagacatcaactacctaaggaatattcaagcgaattactctgtccaagaaaacgaaagactgtagaagctaacatacgagacatgttagtagattcagtggagaccgatacctatccggataaacttccgtttaaaaatggtgtattggacctggtagacggaatgttttactctggagatgatgctaaaaaatatacgtgtactgtatcaaccggatttaaatttgacgatacaaagttcgtcgaagacagtccagaaatggaagagttaatgaatatcattaacgatatccaaccattaacggatgaaaataagaaaaatagagagctatatgaaaaaacattatctagttgtttatgcggtgctaccaaaggatgtttaacattcttttttggagaaactgcaactggaaagtcgacaaccaaacgtttgttaaagtctgctatcggtgacctgtttgttgagacgggtcaaacaattttaacagatgtattggataaaggacctaatccatttatcgctaacatgcatttgaaaagatctgtattctgtagcgaactacctgattttgcctgtagtggatcaaagaaaattagatctgacaatattaaaaagttgacagaaccttgtgtcattggaagaccgtgtttctccaataaaattaataatagaaaccatgcgacaatcattatcgatactaattacaaacctgtttttgataggatagataacgcattaatgagaagaattgccgtcgtgcgattcagaacacacttttctcaaccttctggtagagaggctgctgaaaataatgacgcgtacgataaagtcaaactattagacgaggggttagatggtaaaatacaaaataatatatatagatttgcatttctatacttgttggtgaaatggtacaaaaaatatcatgttcctattatgaaactatatcctacacccgaagagattcctgactttgcattctatctcaaaataggtactctgttggtatctagctctgtaaagcatattccattaatgacggacctctccaaaaagggatatatattgtacgataatgtggtcactcttccgttgactactttccaacagaaaatatccaagtattttaattctagactatttggacacgatatagagagcttcatcaatagacataagaaatttgccaatgttagtgatgaatatctgcaatatatattcatagaggatatttcatctccgtaaatatatgctcatatatttatagaagatatcacatatctaaatgaataccggaatcatagatttatttgataatcatgttgatagtataccaactatattacctcatcagttagctactctagattatctagttagaactatcatagatgagaacagaagcgtgttattgttccatattatgggatcaggtaaaacaataatcgctttgttgttcgccttggtagcttccagatttaaaaaggtttacattctagtgccgaacatcaacatcttaaaaattttcaattataatatgggtgtagctatgaacttgtttaatgacgaattcatagctgagaatatctttattcattccacaacaagtttttattctcttaattataacgataacgtcattaattataacggattatctcgctacaataactctatttttatcgttgatgaggcacataatatctttgggaataatactggagaacttatgaccgtgataaaaaataaaaacaagattccttttttactattgtctggatctcccattactaacacacctaatactctgggtcatattatagatttaatgtccgaagagacgatagattttggtgaaattattagtcgtggtaagaaagtaattcagacacttcttaacgaacgcggtgtgaatgtacttaaggatttgcttaaaggaagaatatcatattacgaaatgcctgataaagatctaccaacgataagatatcacggacgtaagtttctagatactagagtagtatattgtcacatgtctaaacttcaagagagagattatatgattactagacgacagctatgttatcatgaaatgtttgataaaaatatgtataacgtgtcaatggcagtattgggacaacttaatctgatgaataatttagatactttatttcaggaacaggataaggaattgtacccaaatctgaaaataaataatggcgtgttatacggagaagaattggtaacgttaaacattagttccaaatttaaatactttattaatcggatacagacactcaacggaaaacattttatatacttttctaattctacatatggcggattggtaattaaatatatcatgctcagtaatggatattctgaatataatggttctcagggaactaatccacatatgataaacggcaaaccaaaaacatttgctatcgttactagtaaaatgaaatcgtctttagaggatctattagatgtgtataattctcctgaaaacgatgatggtagtcaattgatgtttttgttttcatcaaacattatgtccgaatcctatactctaaaagaggtaaggcatatttggtttatgactatcccagatactttttctcaatacaaccaaattcttggacgatctattagaaaattctcttacgccgatatttctgaaccagttaatgtatatcttttagccgccgtatattccgatttcaatgacgaagtgacgtcattaaacgattacacacaggatgaattaattaatgttttaccatttgacatcaaaaagctgttgtatctaaaatttaagacgaaagaaacgaatagaatatactctattcttcaagagatgtctgaaacgtattctcttccaccacatccatcaattgtaaaagttttattgggagaattggtcagacaatttttttataataattctcgtattaagtataacgataccaagttacttaaaatggttacatcagttataaaaaataaagaagacgctaggaattacatagatgatattgtaaacggtcacttctttgtatcgaataaagtatttgataaatctcttttatacaaatacgaaaacgatattattacagtaccgtttagactttcctacgaaccatttgtttggggagttaactttcgtaaagaatataacgtggtatcttctccataaaactgatgagatatataaagaaataaatgtcgagctttgttaccaatggatacctttccgttacattggaaccacacgagctgacgttagacataaaaactaatattaggaatgccgtatataagacgtatctccatagagaaattagtggtaaaatggccaagaaaatagaaattcgtgaagacgtggaattacctctcggcgaaatagttaataattctgtagttataaacgttccgtgtgtaataacctacgcgtattatcacgttggggatatagtcagaggaacattaaacatcgaagatgaatcaaatgtaactattcaatgtggagatttaatctgtaaactaagtagagattcgggtactgtatcatttagcgattcaaagtactgcttttttcgaaatggtaatgcgtatgacaatggcagcgaagtcactgccgttctaatggaggctcaacaaggtatcgaatctagttttgtttttctcgcgaatatcgtcgactcataaaaaagagaatagcggtaagtataaacacgaatactatggcaataattgcgaatgttttattctcttcgatatatttttgataatatgaaaaacatgtctctctcaaatcggacaaccatctcataaaatagttctcgcgcgctggagaggtagttgccgctcgtataatctctccagaataatatacttgcgtgtcgtcgttcaatttatacggatttctatagttctctgttatataatgcggtttgccctcatgattagacgacgacaatagtgttctaaatttagatagttgatcagaatgaatgtttattggcgttggaaaaattatccatacagcgtctgcagagtggttgatagttgttcctagatatgtaaaataatccaacttactaggcagcaaattgtctagataaaatactgaatcaaacggtgcagacgtattggcggatctaatggaatccaattgattaactatcttttgaaaatatacatttttatgatccaatacttgtaagaatatagaaataatgataagtccatcatcgtgtttttttgcctcttcataagaactatattttttcttattccaatgaacaagattaatctctccagagtatttgtacacatctatcaagtgattggatccataatcgtcttcctttccccaatatatatgtagtgatgataacacatattcattggggagaaaccctccacttatatatcctcctttaaaattaatccttactagttttccagtgttctggatagtggttggtttcgactcattataatgtatgtctaacggcttcaatcgcgcgttagaaattgcttttttagtttctatattaataggagatagttgttgcggcatagtaaaaatgaaatgataactgtttaaaaatagctcttagtatgggaattacaatggatgaggaagtgatatttgaaactcctagagaattaatatctattaaacgaataaaagatattccaagatcaaaagacacgcatgtgtttgctgcgtgtataacaagtgacggatatccgttaataggagctagaagaacttcattcgcgttccaggcgatattatctcaacaaaattcagattctatctttagagtatccactaaactattacggtttatgtactacaatgaactaagagaaatctttagacggttgagaaaaggttctatcaacaatatcgatcctcactttgaagagttaatattattgggtggtaaactagataaaaaggaatctattaaagattgtttaagaagagaattaaaagaggaaagtgatgaacgtataacagtaaaagaatttggaaatgtaattctaaaacttacaacacgggataaattatttaataaagtatatataagttattgcatggcgtgttttattaatcaatcgttggaggatttatcgcatactagtatttacaatgtagaaattagaaagattaaatcattaaatgattgtattaacgacgataaatacgaatatctgtcttatatttataatatgctagttaatagtaaatgaacttttacagatctagtataattagtcagattattaagtataatagacgactagctaagtctattatttgcgaggatgactctcaaattattacactcacggcattcgttaaccaatgcctatggtgtcataaacgagtatccgtgtccgctattttattaactactgataacaaaatattagtatgtaacagacgagatagttttctctattctgaaataattagaactagaaacatgtttagaaagaaacgattatttctgaattattccaattatttgaacaaacaggaaagaagtatactatcgtcatttttttctctagatccagctactactgataatgatagaatagacgctatttatccgggtggcatacccaaaaggggtgagaatgttccagagtgtttatccagggaaattaaagaagaagttaatatagacaattcttttgtattcatagacactcggttttttattcatggcatcatagaagataccattattaataaattttttgaggtaatcttctttgtcggaagaatatctctaacgagtgatcaaatcattgatacatttaaaagtaatcatgaaatcaaggatctaatatttttagatccgaattcaggtaatggactccaatacgaaattgcaaaatatgctctagatactgcaaaacttaaatgttacggccatagaggatgttattatgaatcattaaaaaaattaactgaggatgattgattaaaaaatataaattaatttaccatcgtgtatttttataacgggattgtccggcatatcatgtagatagttaccgtctacatcgtatactcgaccatctacgcctttaaatcctctatttattgacattaatctattagaattggaataccaaatattagtaccctcaattagtttattggtaatattttttttagacgatagatcgatggctcttgaaaccaaggttttccaaccggactcattgtcgatcggtgagaagtctttttcattagcatgaatccattctaatgatgtatgtttaaacactctaaacaattggacaaattcttttgatttgctttgaatgatttcaaataggtcttcgtctacagtaggcataccattagataatctagccattataaagtgcacgtttacatatctacgttctggaggagtaagaacgtgactattgagacgaatggctcttcctactatctgacgaagagacgcctcgttccatgtcatatctaaaatgaagatatcattaattgagaaaaaactaataccctcgcctccactagaagagaatacgcatgttttaatgcattctccgttagtgtttgattcttggttaaactcagccaccgccttgattctagtatcttttgttctagatgagaactctatattagagataccaaagactttgaaatatagtaataagatttctattcctgactgattaacaaatggttcaaagactagacatttaccatgggatgctaatattcccaaacatacatctataaatttgacgcttttctcttttaattcagtaaatagagagatatcagccgcactagcatcccctttcaatagttctccctttttaaaggtatctaatgcggatttagaaaactctctatctcttaatgaatttttaaaatcattatatagtgttgctatctcttgcgcgtattcgcccggatcacgattttgtctttcaggaaagctatcgaacgtaaacgtagtagccatacgtctcagaattctaaatgatgatatacctgtttttatttcagcgagtttagccttttgataaatttcttcttgctttttcgacatattaacgtatcgcattaatactgttttcttagcgaatgatgcagacccttctacgtcatcaaaaatagaaaactcgttattaactatatacgaacatagtcctcctagtttggagactaattctttttcatcgactagacgtttattctcaaatagcgattggtgttgtaaggatcctggtcgtagtaagttaaccaacatggtgaattcttgcacactattgacgataggtgtagccgataaacaaatcatcttatggttttttaacgcaatggtcttagataaaaaattatatactgaacgagtaggacggatcttaccatcttctttgattaatgatttagaaatgaagttatgacattcatcaataatgacgcatattctactcttggaattaatagttttgatattagtaaaaaatttatttctaaaattttgatcatcgtaattaataaaaatacaatccttcgttatctctggagcgtatctgagtatagtgttcatccaaggatcttctatcaaagcctttttcaccaataagataatagcccaattcgtataaatatccttaagatgtttgagaatatatacagtagtcattgttttaccgacacccgtttcatggaacaataaaagagaatgcatactgtctaatcctaagaaaactcttgctacaaaatgttgataatccttgaggcgtactacgtccgaccccatcatttcaacgggcatattagtagttctgcgtaaggcataatcgatataggccgcgtgtgatttactcatttatgagtgataagtaataactatgttttaaaaatcacagcagtagtttaactagtcttctctgatgtttgttttcgatactttttgaatcagaagtcatactagaataaagcaacgagtgaacgtaatagagagcttcgtatactctattcgaaaactctaagaacttattaatgaattccgtatccactggattgtttaaaatactaaattgaacactgttcacatccttccaagaagaagacttagtgacggacttaacatgagacataaataaatccaaattttttttacaaacatcactagccaccataatggcgctatctttcaaccagctatcgcttacgcattttagcagtctaacatttttaaagagactacaatatattctcatagtatcgattacacctctaccgaataaagttggaagtttaataatacaatatttttcgtttacaaaatcaaataatggtcgaaacacgtcgaaggttaacatcttataatcgctaatgtatagattgttttcagtgagatgattattagatttaatagcatctcgttcacgtttgaacagtttattgcgtgcgctgaggtcggcaactacggcgtccgctttagtactcctcccataatactttacgctattaatctttaaaatttcatagactttatctagatcgctttctggtaacatgatatcatgtgtaaaaagttttaacatgtcggtcggcattctatttagatcattaactctagaaatctgaagaaagtaattagctccgtattccagactaggtaatgggcttttacctagagacagattaagttctggcaatgtttcataaaatggaagaaggacatgcgttccctcccggatattttttacaatttcatccatttacaactctatagtttgttttcattattattagttattatctcccataatcttggtaatacttaccccttgatcgtaagataccttatacaggtcattacatacaactaccaattgtttttgtacataatagattggatggttgacatccatggtggaataaactactcgaacagatagtttatctttccccctagatacattagccgtaatagttgtcggcctaaagaatatctttggtgtaaagttaaaagttagggttcttgttccattattgctttttgtcagtagttcattataaattctcgagatgggtccgttctctgaatatagaacatcatttccaaatctaacttctagtctagaaataatatcggtcttattcttaaaatctattcccttgatgaagggatcgttaatgaacaaatccttggcctttgattcggctgatctattatctccgttatagacgttacgttgactagtccaaagacttacaggaatagatgtatcgatgatgttgatactatgtgatatgtgagcaaagattgttctcttagtggcatcactatatgttccagtaatggcggaaaactttttagaaatgttatatataaaagaattttttcgtgttccaaacattagcagattagtatgaagataaacactcatattatcaggaacattatcaatttttacatacacatcagcatcttgaatagaaacgataccatcttctggaacctctacgatctcggcagactccggataaccagtcggtgggccatcgctaacaataactagatcatccaacaatctactcacatatgcatctatataatctttttcatcttgtgagtaccctggatacgaaataaatttattatccgtatttccataataaggtttagtataaacagagagagatgttgccgcatgaacttcagttacagtcgccgttggttggtttatttgacctattactctcctaggtttctctataaacgatggtttaatttgtacattcttaaccatatatccaataaagctcaattcaggaacataaacaaattctttgttgaacgtttcaaagtcgaacgaagagtcacgaataacgatatcggatactggattgaaggttaccgttacggtaatttttgaatcggatagtttaagactgctgaatgtatcttccacatcaaacggagttttaatataaacgtatactgtagatggttctttaatagtgtcattaggagttaggccaatagaaatatcattaagttcactagaatatccagagtgtttcaaagcaattgtattattgatacaattattatataattcttcgccctcaatttcccaaataacaccgttacacgaagagatagatacgtgattaatacatttatatccaacatatggtacgtaactgaatcttcccatacctttaacttctggaagttccaaactcagaaccaaatgattaagcgcagtaatatactgatccctaatttcgaagctagcgatagcctgattgtctggaccatcgtttgtcataactccggatagagaaatatattgcggcatatacaaagttggaatttgactatcgactgcgaagacattagaccgtttaatagagtcatccccaccgatcaaagaattaatgatagtattattcattttctatttaaaatggaaaaagcttacaataaactccgtagagaaatatctataatttgtgagttttccttaaagtaacagcttccgtaaacgccgtctttatctcttagtaggtttattgtatttatgaccttttccttatcttcatagaatactaaaggcaacaaagaaatttttggttcttctctaagagctacgtgagacttaaccatagaagccaacgaatccctacatattttagaacagaaataccctacttcaccacccttgtatgtctcaatactaataggtctaaaaaccaaatcttgattacaaaaccaacacttatcaattacactatttgtcttaatagacacatctgccatagatttataatactttggtagtatacaagcgagtgcttcttctttagcgggcttaaagactgctttaggtgctgaaataaccacatctggaaggcttactcgcttagccatttaattacggaactatttttttatacttctaatgagcaagtagaaaacctctcatctacaaaaacgtactcgtgtccataatcctctaccatagttacacgttttttagatctcatatgtgctaaaaagttttcccatactaattggttactattatttttcgtataatttttaacagtttgaggttttagatttttagttacagaagtgatatcgaatattttatccaaaaagaatgaataattaattgtcttagaaggagtgttttcttggcaaaagaataccaagtgcttaaatatttctactacttcattaatcttttctgtactcagattcagtttctcatcttttacttgattgattatttcaaagactaacttataatcctttttatttattctctcgttagccttaagaaaactagatacaaaatttgcatctacatcatccgtggatatttgatttttttccatgatatccaagagttccgagataatttctccagaacattgatgagacaataatctccgcaatacatttctcaaatgaataagtttattagacacgtggaagtttgactttttttgtacctttgtacatttttgaaataccgactcgcaaaaaatacaatattcatatccttgttcagatactataccgttatgtctacaaccgctacataatcgtagattcatgttaacactctacgtatctcgtcgtccaatattttatataaaaacattttatttctagacgttgccagaaaatcctgtaatatttttagttttttgggctgtgaataaagtatcgccctaatattgttaccgtcttccgccaatatagtagttaaattatccgcacatgcagaagaacaccgcttaggcggattcagtacaatgttatatttttcgtaccaactcatttaaatatcataatctaaaatagttctgtaatatgtctagcgctaatatattgatcataatcctgtgcataaattaagatacaacaatgtctcgaaatcatcgacatggcttcttccatagttagaagatcgtcgtcaaagttagcaacgtgattcatcaacatttgctgttttgaggcagcaaatactgaaccgtcgccattcaaccattcataaaaaccatcgtctgaatccattgataatttcttgtactggtttttgagagctcgcatcaatctagcatttctagctcccggattgaaaacagaaagaggatcgtacatccagggtccattttctgtaaatagaatcgtataatgtcccttcaagaagatatcagacgatccacaatcaaagaattggtctccgagtttgtaacaaactgcggactttaacctatacatgataccgtttagcataatttctggtgatacgtcaatcggagtatcatctattagagatctaaagccggtgtaacattctccaccaaacatattcttattctgacgtcgttctacataaaacatcattgctccattaacgataacaggggaatgaacagcactacccatcacattagttcccaatggatcaatgtgtgtaactccagaacatcttccatagcctatgttaggaggagcgaacaccactcttccactattgccatcgaatgccatagaataaatatccttggaattgatagaaatcggactgtcggatgttgtgatcatcttcataggattaacaactatgtatggtgccgcctgaagtttcatatcgtaactgatgccgtttataggtctagccacagaaaccaacgtaggtctaaatccaactatagacaaaatagaagccaatatctgttcctcatctgtcataacttgagagcatccagtatgaataatcttcattagatggggatctaccgcatcatcatcgttacaataaaaaattcccattctaatgttcataattgcttttctaatcatggtatgcatgtttgctctctgaatctctgtggaaattagatctgatacacctgtaatcactatcggattatcctccgtaagacgattaaccaacaacatataattataagactttacttttctaaattcataaagttgctggattaggctataggtgtctccatgtacatacgcgttctcgagcgcaggaagtttaataccgaatagtgccatcagaataggatgaatatagtaattagtttctggttttctataaataaaagacaaatcttgtgaactagacatatcggtaaaatgcatggattggaatcgtgtagtcgacagaagaatatgatgattagatggagagtatattttatctaactctttgagttggtcaccgattctaggactagctcgagaatgaataagtactaaaggatgagtacatttcacagaaacactagcattgttcaatgtgctctttacatgggtaaggagttgaaatagctcgtttctatttgttctgacaatatttagtttattcataatgttaagcatatcctgaatagtaaagttagatgtgtcatacttgttagtagttagatatttagcaattgcattcccatcatttctcaatctcgtactccaatcatgcgtggatgctacttcgtcgatggaaaccatacaatcctttttgataggctgttgagattgatcatttcctgcacgtttaggtttggtacgttgatttctagcccctgcggatataaagtcatcgtctacaatttgggacaatgaattgcatacactacaagacaaagatttatcagaagtgtgaatatgatcttcatctaccaaagaaagagtttgattagtataactagattttagtcctgcgttagatgttaaaaaaacatcgctattgaccacggcttccattatttatattcgtagtttttactcgaaagcgtgattttaatatccaatcttattacttttggaatcgttcaaaacctttgactagttgtagaatttgatctattgccctacgcgtatactcccttgcatcatatacgttcgtcaccagatcgtttgtttcggcctgaagttggtgcatatctctttcaacattcgacatgagatccttaagggccatatcgtctagattttgttgagatgctgctcctggatttggattttgttgtgctgttgtacatactgtaccaccagtaggtgtaggagtacatacagtggccacaataggaggttgagaaagtgtaaccgttggagtagtacaagaaatacttccatccgattgttgtgtacatgtagttgttggtaacgtctgagaaggttgggtagatggcggcgtcgtcgttttttgatctttattaaatttagagataatatcctgaacagcattgctcggcgtcaacgctggaaggagtgaactcgccggcgcatcagtatcttcagacagccaatcaaaaagattagacatatcagatgatgtattagtttgttgtcgtggttttggtgtaggagcagtactactaggtagaagaataggagccgatgtagctgttggaaccggctgtggagttatatgaatagttggttgtagcggttggataggctgtctgctggcggccatcatattatctctagctagttgttctcgcaactgtctttgataatacgactcttgagactttagtcctatttcaatcgcttcatcctttttcgtatccggatccttttcttcagaataatagattgacgactttggtgtagaggattctgccagcctctgtgagaacttgttaaagaagtccatttaaggctttaaaattgaattgcgattataagattaaatggcagacacagacgatattatcgactatgaatccgatgatctcaccgaatacgaggatgatgaagaagaggaagaagatggagagtcactagaaactagtgatatagatcccaaatcttcttataagattgtagaatcagcatccactcatatagaagatgcgcattccaatcttaaacatatagggaatcatatatctgctcttaaacgacgctatactagacgtataagtctatttgaaatagcgggtataatagcagaaagctataacttgcttcaacgaggaagattacctctagtttcagaattttctgacgaaacgatgaagcaaaatatgctacatgtaattatacaagagatagaggagggttcttgtcctatagtcatcgaaaagaacggagaattgttgtcggtaaacgattttgacaaagatggtctaaaattccatctagactatattatcaaaatttggaaacttcaaaaacgatattagaatttatacgaatatcgttctctaaatgtcacaatcaagtctcgcatgttcagcaatttattgtcgtactttatatcgtgttcattaacgatatcttgcaaaatagtaatgattctatcttccttcgatagatattcttcagagattattgtcttatattctttcttgttatcagatatgaatttgataagactttgaacattattgatacccgtctgtttaattttttctacagatattttagttttggcagattctatcgtatctgtcaatagacatccaacatcgacattcgacgtcaattgtctataaatcaacgtataaattttagaaataacattagcgaattgttgtgcgttgatgtcgttattctgaaacagtatgattttaggtagcattttcttaacaaagagaacgtatttattgttactcagttgaacagatgatatatccagattactaacgcatctgattccgtataccaaactttcagaagaaatggtatacaattgtttgtattcattcaatgtctctttttcagaaattagtttagagtcgaatactgcaataattttcaagagatagttttcatcagataagattttatttagtgtagatatgataaaactattgttttgttggagaacttgatacgccgcgttctctgtagtcgacgctctcaaatgggaaacaatctccattatttttttggaatcggatactatatcttcggtatcttgacgcagtctagtatacatagagttaagagagattagagtttgtacattaagcaacatgtctctaaatgtggctacaaacttttcctttttcacatcatctagtttattatataccgatttcacaacggcaccagatttaaggaaccagaatgaaaaactctgataactacaatatttcatcatagttacgattttatcatcttctatagttggtgtaatagcgcatacctttttctccaagactggaaccaacgtcataaaaatgtttaaatcaaaatccatatcaacatctgatgcgctaagaccagtctcgcgttcaagattatctttactaatggtgacgaactcatcgtataaaactctaagtttgtccattatttatttacagatttagttgtttaatttatttgtgctcttccagagttgggatagtatttttctaacgtcggtattatattattaggatctacgttcatatgtatcataatattaatcatccacgttttgataaatctatctttagcttctgaaataacgtatttaaacaaaggagaaaaatatttagctacggcatcagacgcaataacattttttgtaaatgtaacgtatttagacgacagatcttcgttaaaaagttttccatctatgtagaatccatcggttgttaacaccattcccgcgtcagattgaataggagtttgaatagtttgttttggaaatagatccttcaataacttatagttgggtgggaaaaaatcgattttatcactagactctttcttttttactatcattacctcatgaactatttcttgaatgagtatatgtattttctttcctatatcggacgcgttcattggaaaatataccatgtcgttaactataagaatatttttatcctcgtttacaaactgaataatatcagatgtagttcgtaaacgaactatatcatcaccagcacaacatctaactatatgatatccactagtttcctttagccgtttattatcttgttccatattagcagtcattccatcatttaagaaggcgtcaaaaataatagggagaaatgacattttggattctgttacaactttaccaaaattaaggatatacggacttactatctttttctcaacgtcaatttgatgaacacacgatgaaaatgtgcttctatgagattgatcatgtagaaaacaacaagggatacaatatttccgcatatcatgaaatatattaagaaatcccaccttattatatttccccaaaggatccatgcacgtaaacattatgccgttatcattaataaagacttctttctcatcggatctgtaaaagttgttactgatttttttcattccaggatctagataattaataatgatgggttttctattcttattctttgtattttggcatatcctagaccagtaaacagtttccactttggtaaaatcagcagacttttgaacgctattaaacatggcattaatggcaataactaaaaatgtaaaatatttttctatgttaggaatatggtttttcactttaatagatatatggtttttggccaaaatgatagatatttttttatccgaggatagtaaaatattattagtcgccgtctctataaaaatgaagctagtctcgatatccaattttattctagaattgataggagtcgccaaatgtaccttatacgttatatctcccttgatgcgttccatttgtgtatctatatcggacacaagatctgtaaatagttttacgttattaatcatcacggtatcgccgtcgctagataacgctaatgtaccatccaagtcccaaatggagagatttaactgttcatcgtttagaataaaatgattaccggtcatattaataaagtgttcatcgtatctagataacaacgacttataattaatgtccaagtcttgaactcgctgaatgatcttttttaacccagttagttttagattggtacgaaatatattgttaaactttgattctacagtaatgtccaaatctagttgtggaaatacttccatcaacattgtttcaaacttgataatattattatctacatcttcgtacgatccaaattccggaatagatgtatcgcacgctctggccacccagataaccaaaaagtcacacgctccaggatatacattgtataaaaagctatcgttttttagtagggtttttttctgcgtgtatacgaagggattaaaaatagtattatcaacgtaactatattccaaattattcttatgagaatagataataatatcgtccttaatatctaacaaatttcctaaatatccctttaattgagtcattcgaagcgtcaatagaatatgtctcttaactatttccggctgttgtatatttaaatgacttcgtaaaaaataatatatgggcgacttctcatctatgtaatcatatggagtgagatatagggctcgttctacctcctgccccttacccacctgtaataccaattgcggacttactatatatcgcatatttatatcgtggggtaaagtgaaaatctactaccgatgatgtaagtcttacaatgttcgaaccagtaccagatcttaatttggaggcctccgtagaactaggggaggtaaatatagatcaaacaacacctatgataaaggagaatagcggttttatatcccgcagtagacgtctattcgcccatagatctaaggatgatgagagaaaactagcactacgattctttttacaaagactttattttttagatcatagagagattcattatttgttcagatgcgttgacgctgtaaaagacgtcactattaccaaaaaaaataacattatcgtggcgccttatatagcacttttaactatcgcatcaaaaggatgcaaacttacagaaacaatgattgaagcattctttccagaactatataatgaacatagtaagaaatttaaattcaactctcaagtatccatcatccaagaaaaactcggataccagtttggaaactatcacgtttatgattttgaaccgtattactctacagtagctctggctattcgagatgaacattcatctggcatttttaatatccgtcaagagagttatctggtaagttcattatctgaaataacatatagattttatctaattaatctaaaatctgatcttgttcaatggagtgctagtacgggcgctgtaattaatcaaatggtaaatactgtattgattacagtgtatgaaaagttacaactggtcatagaaaatgattcacaatttacatgttcattggctgtggaatcaaaacttccaataaaattacttaaagatagaaatgaattatttacaaaattcattaacgagttaaaaaagaccagttcattcaagataagcaaacgcgataaggatacgctactaaaatattttacttaggactggagttagaatttatagacgactcatttcgtttatcattgttactattattactattactatcattattagtgttggcattattagtattcttcttgtcatcttgttcagaaatatacagcaatgctatacctaatactaaatacattatcatgctcgcaatggctctaacaacaacgaaccaaaatgaatttggtcgtagcttttgttcacaaaaatacataaagaaatgtctacataaatctatggcgccattggctacttgaaatagcgccagtcctcctacagattttaatatagctgtataacatgacatttattcatcatcaaaagagacagagtcaccatctgtcatatttagattttttttcatgtgttcaaagtatcctctactcatttcattataatagtttatcatacttagaattttaggacggatcaatgagtaagacttgactagatcgtcagtagtaatttgtgcatcgtctattctgcatccgcttcgtcgaataatgtatagcatcgctttgagattctccatagctatcaagtctttatacaatgacatggaaatatctgtgaatactttatacttctccaacatcgatgccttaacatcatcgcctactttagcattgaaaatacgttctattgtgtagatggatgtagcaagatttttaaacaacaatgccatcttacacgatgattgcctcaagtctccaatcgtttgtttagaacgattagctacagagtccaatgcttggctgactagcatattattatctttagaaattgtattcttcaatgaggcgtttatcatatctgtgatttcgttagtcatattacagtctgactgggttgtaatgttatccaacatatcacctatggatacggtacacgtaccagcatttgtaataatcctatctaagatgttgtatggcattgcgcagaaaatatcttctcctgtaatatctccactctcgataaatctactcagattattcttaaatgccttattctctggagaaaagatatcagtgtccatcatttcattaatagtatacgcagaaaagataccacgagtatcaattctatccaagatacttatcggttccgagtcacagataatggtttcctctccttcgggagatcctgcatagaaatatctaggacaatagtttctatactgtctgtaactctgataatctctaaagtcactaactgataccatgaaattgagaagatcaaacgctgaagtaattaatttttctgcctcgtttttactacaactagttttcatcaatgtagtgacgatgtattgtttagttacttttggtctaatactgatgatagagatattattgcttcccataatggatcttctagtagtcaccttaaagcccattgatgcgaatagcagatagataaagtcttggtatgactcctttctaatatagtacggactacctttgtcacccaactttatacccacataagccataacaacctctttaatagccgtttcatgaggtttatcagccatgagcctgagtagttggaagaatctcatgaatcccgtctcagaaagtcctatatgcatgatagatttatctttcctgggaaactctcgtatagtcatagatgaaatactctttaaagtttctgaaataagattagtaacagtcttacctccgactactctaggtaacaaacaaactctaataggtgttttctctgcggagataatatcagaaaggatagagcaataagtagtattattgtgattataaagaccgaatacataacaggtagaatttataaacatcatgtcctgaaggtttttagacttgtattcctcgtaatccataccgtcccaaaacatggatttggtaactttgatagccgtagatctttgttccttcgccaacaggttaaagaaattaataaagaatttgttgtttctatttatgtccacaaattgcacgtttggaagcgccacggttacattcactgcagcattttgaggatcgcgagtatgaagtacgatgttattgtttactggtatatctggaaagaaatctaccagtctaggaataagagattgatatcgcatagaaatagtaaagtttataatctcatcatcgaagagcattttgttaccattgtaataaatatccactctgtcatatgtataaatgaagtactgttcaaacatgatgagatgtttatatgttggcatagtagtgagatcgacgtttggtaatggcaatgtattaagattaactccataatgtctagcagcatctgcgatgttataagcgtcgtcaaagcggggtcgatcttgtattgttatatattgtctaacacctataagattatcaaaatcttgtctgcttaatacaccgttaacaatttttgccttgaattcttttattggtgcattaataacatccttatagaggatgttaaacaaataagtgttatcaaagttaagatctggatatttcttttctgctagaacatccattgagtcggagccatctggtttaatataaccaccgataaatctagctctgtattctgtatccgtcaatctaatattaagaaggtgttgagtgaaaggtggaagatcgtaaaagctgtgagtattaatgataggattagtttccgaactaatgttaattggggtattaataatatctatatttccagcgttaagtgtaacattaaacagttttaattcacgtgacgtggtatcaattaaataattaatgcccaatttggatatagcagcctgaagctcatcttgtttagttacggatcctaatgagttattaagcaatatatcgaacggatgaacgaaggttgttttaagttggtcacatactttgtaatctagacatagatgcggaagaacggtagaaactatacgaaataaatattcagagtcctctaattgatcaagagtaactattgacttaataggcatcatttatttagtattaaatgacgaccgtaccagtgacggatatacaaaacgatttaattacagagttttcagaagataattatccatctaacaaaaattatgaaataactcttcgtcaaatgtctattctaactcacgttaacaacgtggtagatagagaacataatgccgccgtagtgtcatctccagaggaaatatcctcacaacttaatgaagatctatttccagatgatgattcaccggccactattatcgaacgagtacaacctcatactactattattgacgatactccacctcctacgtttcgtagagagttattaatatcggaacaacgtcaacaacgagaaaaaagatttaatattacagtatcgaaaaatgctgaagcaataatggaatctagatctatgataacttctatgccaacacaaacaccatccttgggagtagtttatgataaagataaaagaattcagatgttagaggatgaagtggttaatcttagaaatcaacgatctaatacaaaatcatctgataatttagataattttaccaaaatactatttggtaagactccgtacaaatcaacagaagttaataagcgtatagccatcgttaattatgcaaatttgaacgggtcccccttatcagtcgaggacttggatgtttgttcggaggatgaaatagatagaatctataaaacgattaaacaatatcacgaaagtagaaaacgaaaaattatcgtcactaacgtgattattattgtcataaacattatcgagcaggcattgctaaaactcggatttgaagaaatcaaaggactgagtaccgatatcacttcagaaattatcgatgtggagatcggagatgactgcgatgctgtagcatctaaactaggaatcggtaacagtccggttcttaatattgtattgtttatactcaagatattcgttaaacgaattaaaattatttaatttaatacattcccatatccagacaacaatcgtctggattaatctgttcctgtcgtctcataccggacgacatattaatctttttattagtgggcatctttttagatggtttctttttcccagcattaactgagtcgatacctagaagatcgtgattgatctctccgaccattccacgaacttctaattggccgtctctgacggtaccataaactattttaccagcattagtaacagcttggacaatctgaccatccatcgcattgtacgatgtagtagtaactgttgttctacgtctaggagcaccagaagtatttttggagcccttggatgttgatgtagaagaagacgaggattttgattttggtttacatgtaatacattttgaactctttgattttgtatcacatgcgccggcagtcacatctgtttgagaattaagattattgttgcctcctttgacggctgcatctccaccgatttgcgctagtagatttttaagctgtggtgtaatcttattaactgtttcgatataatcatcgtaactgcttctaacggctaaattttttttatccgccatttagaagctaaaaatatttttatttatgcagaagatttaactagattatacaatgaactaatatgatccttttccagattatttacaaacttggtattttttggttctggaggaggcgaatttaaattcggacttggattcggattttgtaagttcttgatcttattatacatcgagtataggatggcgacagtaactgctacacaaataccgatcaaaagaagaataccaatcatttattgacaataacttcactattgatcaagtatgcaatatatcatcttttcactaaataagtagtaataatgattcaacaatgtcgagatatatggacgataataatttagttcatggaaatatcgctatgattggtgtgaatgactccgctaactctgtggggtgcgcagtgctttccccacatagaataaattagcattccgactgtgataataataccaagtataaacgccataatactcaatactttccatgtacgagtgggactggtagacttactaaagtcaataaaggcgaagatacacgaaagaatcaaaagaatgattccagcgattagcacgccggaaaaataatttccaatcataagcatcatgtccatttaactaataaaaattttaaatcgccgaatgaacaaagtggaatataaaccatataaaaacaatagtttgtactgcaaaaataatatctatttttgttttcgaagatatggtaaaattaaatagtagtacacagcatgttataactaacagcagcaacggctcgtaattacttatcatttactagacgaaaaggtggtgggatattttcttgctcaaataatacgaatatatcacccatccattttatgcgatgtttatatactctaatctttaatagatctatagacgacgggtttaccaacaatatagattttatcgattcatctaatttaaacccttccttaaacgtgaatgatctattatctggcataacgatgaccctacctgatgaatcggacaatgtactgggccatgtagaataaattatcaacgaattatcgtctacgaacatttatatcatttgttttaattttaggacgcgaataaatggatataaaatagaaaataacagatattacaaccagtgttatggccgcgcccaaccaggtaggcagttttattttatcttttactacaggttctcctggatgtacgtcaccaacggcggacgtagttctagtacaattagacgtaagttccgcttgggaattttttaacgctaaagagttaacgttaatcgtgcacccaacgtatttacatctagttcgttgaacatcttgattataatataaccattttctatctctagattcgtcagtgcactcatgtaaccaacataccctaggtcctaaatatttatctccggaattagattttggataattcgcgcaccaacaatttctatttcctttatgatcgttacaaaagacgtataatgccgtatccccaaaagtaaaataatcaggacgaataattctaataaactcagaacaatatctcgcatccatatgtttggagcaaatatcggaataagtagacatagccggtttccgttttgcacgtaaccattctaaacaattggggtttccaggatcgtttctacaaaatccagtcatgaaatcgtcacaatgttctgtcttgtaattattattaaatatttttggacagtgtttggtatttgtcttagaacaacattttgccacgctatcactatcgcccaggagataatccttttttataaaatgacatcgttgcccggatgctatataatcagtagcgtgttttaaatccttaatatattcaggagttacctcgttctgataatagattaatgatccaggacgaaatttgaaagaactacatggttctccatgaattaatacatattgtttagcaaattcaggaactataaaactactacaatgatctatcgacataccatctatcaaacaaaacttgggtttaatttctcccggagatgtttcataatagtacgtataactttcttctgcaaacttaacagctctattatattcaggataattaaaacctaattccatatatttgtctcgtatatctgctattcctggtgctattttgattctattaagagtaacagctgcccccattcttaataatcgtcagtatttaaactgttaaatgttggtatatcaacatctaccttatttcccgcagtataaggtttgttgcaggtatactgttcaggaatggttacatttatacttcttctatagtcctgtctttcgatgttcatcacatatgcaaagaacagaataaacaaaataatgtaagaaataatattaaatatctgtgaattcgtaaatacattgattgccataataattacagcagctacaatacacacaatagacattcccacagtgttgccattacctccacgatacatttgagttactaagcaataggtaataactaagctagtaagaggcaatagaaaagatgagataaatatcatcaatatagagattagaggagggctatatagagccaagacgaacaaaatcaaaccgagtaacgttctaacatcattatttttgaagattcccaaataatcattcattcctccataatcgttttgcatcatacctccatctttaggcataaacgattgctgctgttcctctgtaaataaatctttatcaagcactccagcacccgcagagaagtcgtcaagcatattgtaatatcttaaataactcatttatatattaaaaaatgtcactattaaagatggagtataatctttatgccgaactaaaaaaaatgacttgtggtcaacccctaagtctttttaacgaagacggggatttcgtagaagttgaaccgggatcatcctttaagtttctgatacctaagggattttacgcctctccttccgtaaagacgagtctagtattcgagacattaacaacgaccgataataaaatcactagtatcaatccaacaaatgcgccaaagttatatcctcttcaacgcaaagtcgtatctgaagtagtttctaatatgaggaaaatgatcgaatcaaaacgtcctctatacatcactcttcacttggcgtgtggatttggtaagactattaccacgtgttatcttatggctacacacggtagaaaaaccgtcatttgcgtacccaataaaatgttaatacatcaatggaagacacaggtagaggcagtcggattggaacataagatatccatagatggagtaagtagtctattaaaggaactaaagactcaaagtccggatgtattaatagtagtcagtagacatctgacaaacgatgccttttgtaaatatatcaataagcattatgatttgttcatcttggatgaatcacatacgtataatctgatgaacaatacagcagttacaagatttttagcgtattatcctccgatgatgtgttattttttaactgctacacctagaccatctaaccgaatttattgtaacagtattattaatattgccaagttatccaatctaaaaaaaactatctatgcagtagatagtttttttgagccatattccacagataatattagacatatggtaaaacgactagatggaccatctaataaatatcatatatataccgagaagttattatctgtagacgagcctagaaatcaacttattcttgataccctggtagaagaattcaagtcaggaactattaatcgcattttagttattactaaactacgtgaacatatggtattattctacaaacgattattagattttttcggaccagaggttgtatttataggagacgcccaaaatagacgtactccagatatggtcaaatcaatcaaggaactaaatagatttatattcgtatccaccttattttattccggtactggtttagatattcctagtttggattcgttgttcatttgctcggcagtaatcaacaatatgcaaatagagcaattactagggagggtatgtcgagaaacagaactattagataggacggtatatgtatttcctaacacatccatcaaagaaataaagtacatgataggaaatttcatgcaacgaattattagtctgtctgtagataaactaggatttaaacaaaaaagttatcggaaacatcaagaatccgatcccacttctgcatgtacaacatcatccagagaagaacgtgtattaaatagaatatttaactcgcaaaatcgttaagaagtttaagcgacgatccgcatgctgcgcaggccagtgtattacccctcatagtattaatataatccaatgatacttttgtgatgtcggaaatcttaaccaatttagactgacaggcagaacacgtcatgcaatcatcatcgtcatcgataactgtagtcttgggcttctttttgcgactcttcattccggaacgcacattggtgctatccatttaggtagtaaaaaataagtcagaatatgccctataacacgatcgtgcaaaacctggtatatcgtctctatctttatcacaatatagtgtatcgacatttttattattattgacctcgtttatcttggaacatggaatgggaacatttttgttatcaacggccatctttgccttaattccagatgttgtaaaattataactaaacagtctatcatcgacacaaatgaaattcttgtttagacgtttgtagtttacgtatgcggctcgttcgcgtctcattttttcagatattgcaggtactataatattaaaaataagaatgaaataacataggattaaaaataaagttatcatgacttctagcgctgatttaactaacttaaaagaattacttagtctgtacaaaagtttgagattttcagattctgcggctatagaaaagtataattctttggtagaatggggaacatctacttactggaaaataggcgtgcaaaaggtagctaatgtcgagacgtcaatatctgattattatgatgaggtaaaaaataaaccgtttaatattgatccgggctattacattttcttaccggtatattttgggagcgtctttatttattcgaagggtaaaaatatggtagaacttggatctggaaactcttttcaaataccagatgatatgcgaagtgcgtgtaacaaagtattagacagcgataacggaatagactttctgagatttgttttgttaaacaatagatggataatggaagatgctatatcaaaatatcagtctccagttaatatatttaaactagctagtgagtacggattaaacatacccaaatatttagaaattgaaatagaggaagacacattatttgacgacgagttatactctattatagaacgctctttcgatgataaatttccaaaaatatccatatcgtatattaagttgggagaacttagacggcaagttgtagactttttcaaattctcattcatgtatattgagtccatcaaggtagatcgtataggagataatatttttattcctagcgttataacaaaatcaggaaaaaagatattagtaaaagatgtagaccatttaatacgatccaaggttagagaacatacatttgtaaaagtaaaaaagaaaaacacattttccattttatacgactatgatggaaacggaacagaaactagaggagaagtaataaaacgaattatagacactataggacgagactattatgttaacggaaagtatttctctaaggttggtagtgcaggcttaaagcaattgactaataaattagatattaatgagtgcgcaactgtcgatgagttagttgatgagattaataaatccggaactgtaaaacgaaaaataaaaaaccaatcagcatttgatttaagcagagaatgtttgggatatccagaagcggattttataacgttagttaataacatgcggttcaaaatagaaaattgtaaggttgtaaatttcaatattgaaaatactaattgtttaaataacccgagtattgaaactatatatggaaactttaaccagttcgtctcaatctttaatgtcgtcaccgatgtcaaaaaaagattattcgagtgaaataatatgcgcctttgatataggtgcaaaaaatcctgccagaactgttttagaagtcaaggataactccgttagggtattggatatatcaaaattagactggagttctgattgggaaaggcgcatagctaaagatttgtcacaatatgaatacactacagttcttctagaacgtcagcctagaaggtcgccgtatgttaaatttatctattttattaaaggctttttatatcatacatcggctgccaaagttatttgcgtctcgcctgtcatgtctggtaattcatatagagatcgaaaaaagagatcggtcgaagcatttcttgattggatggacacattcggattgcgagactccgttccggatagacgcaaattagacgatgtagcggatagtttcaatttggctatgagatacgtattagataaatggaatactaattatacaccttataataggtgtaaatctagaaattacataaaaaaaatgtaataacgttagtaacgccattatggataatctatttacctttctacatgaaatagaagatagatatgccagaactatttttaactttcatctaataagttgcgatgaaataggagatatatatggtcttatgaaagaacgcatttcctcagaggatatgtttgataatatagtgtataataaagatatacatcctgccattaagaaactagtgtattgcgacatccaacttactaaacacattattaatcagaatacgtatccggtatttaacgattcttcacaagtgaaatgttgtcattatttcgacataaactcagataatagcaatattagctctcgtacagtagagatatttgagagggaaaagtcatctcttgtatcatatattaaaactaccaataagaagagaaaggtcaattacggcgaaataaagaaaactgttcatggaggcactaatgcaaattacttttccggtaaaaagtctgacgagtatctgagtactacagttagatccaacattaatcaaccttggatcaaaaccatctctaagaggatgagagttgatatcattaatcactctatagtaacgcgtggaaaaagctctatattacaaactatagaaattatttttactaatagaacatgtgtgaaaatattcaaggattctactatgcacattattctatccaaggacaaggatgaaaaggggtgtatacacatgattgacaaattattctatgtctattataatttatttctgttgttcgaagatatcatccaaaacgagtactttaaagaagtagctaatgttgtaaaccacgtactcacggctacggcattagatgagaaattattcctaattaagaaaatggctgaacacgatgtttatggagttagcaatttcaaaatagggatgtttaacctgacatttattaagtcgttggatcataccgttttcccctctctgttagatgaggatagcaaaataaagttttttaaggggaaaaagctcaatattgtagcattacgatctctggaggattgtataaattacgtgactaaatccgagaatatgatagaaatgatgaaggaaagatcgactattttaaatagcatagatatagaaacggaatcggtagatcgtctaaaagaattgcttctaaaatgaaaaaaaacactaattcagaaatggatcaacgactagggtataagtttttggtgcctgatcctaaagccggagttttttatagaccgttacatttccaatatgtatcgtattctaattttatattgcatcgattgcatgaaatcttgaccgtcaagcggccactcttatcgtttaagaataatacagaacgaattatgatagaaattagcaatgttaaagtgactcctccagattactcacctataatcgcgagtattaaaggtaagagttatgacgcattagccacgttcactgtaaatatctttaaagaggtaatgaccaaagagggtatatccatcactaaaataagtagttatgagggaaaagattctcatttgataaaaattccgctactaataggatacgggaataaaaatccacttgatacagccaagtatcttgttcctaatgtcataggtggagtctttatcaataaacaatctgtcgaaaaagtaggaattaatctagtagaaaagattacaacatggccaaaatttagggttgttaagccaaactcattcactttctcgttttcctccgtatcccctcctaatgtattaccgacaagatatcgccattacaagatatctctggatatatcacaattggaagcgttgaatatatcatcgacaaagacatttataacggtcaatattgttttgctgtctcaatatttatctagagtgagtctagaattcattagacgtagtttatcatacgatatgcctccagaagttgtctatctagtaaacgcgataatagatagtgctaaacgaattactgaatctattactgactttaatattgatacatacattaatgacctggtggaagctgaacacattaaacaaaaatctcagttaacgatcaacgagttcaaatatgaaatgctgcataactttttacctcatatgaactatacacccgatcaactaaagggattttatatgatatctttactaagaaagtttctctactgtatcttccacacttctagatatccagatagagattcgatggtttgtcatcgcatcctaacgtacggcaaatattttgagacgttggcacatgatgaattagagaattacataggcaacatccgaaacgatatcatgaacaatcacaagaacagaggcacttacgcggtaaacattcatgtactaacaactcccggacttaatcacgcgttttctagcttattgagtggaaagttcaaaaagtcagacggtagttatcgaacacatcctcactattcatggatgcagaatatttctattcctaggagtgttggattttatccggatcaagtaaagatttcaaagatgttttctgtcagaaaataccatccaagtcaatatctttacttttgttcatcagacgttccggaaagaggtcctcaggtaggtttagtatctcaattgtctgtcttgagttccattacaaatatactaacgtctgagtatttggatttggaaaagaaaatttgtgagtatatcagatcatattataaagatgatataagttactttgaaacaggatttccaatcactatagaaaatgctctagtcgcatctcttaatccaaatatgatatgtgattttgtaactgactttagacgtagaaaacggatgggattcttcggtaacttggaggtaggtattactttagttagggatcacatgaatgaaattcgcattaatattggagcgggaagattagtcagaccattcttggttgtggataacggagagctcatgatggatgtgtgtccggagttagaaagcagattagacgacatgacattctctgacattcagaaagagtttccgcatgtcatcgaaatggtagatatagaacaatttacttttagtaacgtatgtgaatcggttcaaaaatttagaatgatgtcaaaggatgaaagaaagcaatacgatttatgtgactttcctgccgaatttagagatggatatgtagcatcttcattagtgggaatcaatcacaattctggacccagagctattcttggatgtgctcaagctaaacaagctatctcttgtctgagctcggatatacgaaataaaatagacaatggaattcatttgatgtatccagagaggccaatcgtgattagtaaggctttagaaacttcaaagattgcggctaattgcttcggccaacatgttactatagcattaatgtcgtacaaaggtatcaatcaagaggatggaattatcatcaaaaaacaatttattcagagaggcggtctcgatattgttacagccaagaaacatcaagtagaaattccattggaaaactttaataacaaagaaagagataggtctaacgcctattcaaaattagaaagtaatggattagttagactgaatgctttcttggaatccggagacgctatggcacgaaatatctcatcaagaactcttgaagatgattttgctagagataatcagattagcttcgatgtttccgagaaatataccgatatgtacaaatctcgcgttgaacgagtacaagtagaacttactgacaaagttaaggtacgagtattaaccatgaaagaaagaagacccattctaggagacaaatttaccactagaacgagtcaaaagggaacagtcgcgtatgtcgcggatgaaacggaacttccatacgacgaaaatggtatcacaccagatgtcattattaattctacatccatcttctctagaaaaactatatctatgttgatagaagttattttaacagccgcatattctgctaagccgtacaacaataagggagaaaaccgacctgtctgttttcctagtagtaacgaaacatccatcgatacatatatgcaattcgctaaacaatgttatgagcattcaaatccgaaattgtccgatgaagaattatcggataaaatcttttgtgaaaagattctctatgatcctgaaacggataagccttatgcatccaaagtattttttggaccaatttattacttgcgtctgaggcatttaactcaggacaaggcaaccgttagatgtagaggtaaaaagacgaagctcattagacaggcgaatgagggacgaaaacgtggaggaggtatcaagttcggagaaatggagagagactgtttaatagcgcatggtgcagccaatactattacagaagttttgaaagattcggaagaagattatcaagatgtgtatgtttgtgaaaattgtggagacatagcagcacaaatcaagggtattaatacatgtcttagatgttcaaaacttaatctctctcctctcttaacaaaaattgataccacgcacgtatctaaagtatttcttactcaaatgaacgccagaggcgtaaaagtcaaattagatttcgaacgaaggcctccttcgttttataaaccattagataaagttgatctcaagccgtcttttctggtgtaatattctagtttggtagtagatacatatcaatatcatcaaattcgagatccgaattataaaatgggcgtggattgttaactatagaatcggacgtctgatattcgaaaatctgtggagtttcaggttttggtggaggtgtaactgctacttgggatactgaagtctgatattcagaaagctgtggatgttctggttcggcatccaccgatggtgtcacatcactaatcggttcggtaacgtctgtggatggaggtgctacttctacagaacctgtagcctcagttgtcaacggagatacatttttaatgcgagaaaatgtataatttggtaatggtttcttatgtggatctgaagaagaggtaagatatctactagaaagataccgatcacgttctagttctcttttgtagaacttaactttttctttctccgcatctagttgatattccaacctcttcacgttactacgttcagattccaattcacgttcgcatgggttacctccgcagtttttacgagcgatttcacgttcagccttcatgcgtctctccctctctctatcgagtttatcagagcagtctttctgaaggcgatcgaactccataaatttctccaacgctttgattgtttccatagatttccgaagttcagcttttaggactgtgattctttttctttcgaattcacagctggatgtacaaccgtttccattaccgccatctctaagtttcttttctagatcggcaacatttcatccccatgccttttacattcctcgagtctactgtcgtcgaaatatcgttccagctccttttcgacatcaataactttagcacgttgtctctcaagctctcttttgtagttatctgattccctggcacgtttaagatcttcatgcaattgagtcagctcttaacttcctctcttgcttcttcgtcatagtacgcgcaatcactgtgagatccattgttaccacgtctacactcggcgagctcgcgtttaagagattcaatttcccgtttgtattggtccatgtttccattgctaccaccattagatttacaggctgctagttgtcgttcgagatcagaaatacgggttttcttggaattgatttcgtcgatgtacttggcatcgaaacacttattaagttctttttccaattctacgattttatttctttcgcgagtcaattccctcctgtagtaactatctgttttgtcagattcacgctctctacgtagactttcttgcaagttactaatttgttccctagcacgtccgagtttagttttatatgctgaatagagttctgattcatcctttgagcagatctctagcgatcgtttaagattcctaattctagtctttagcctatttacctcctcagaagatgttccgttaccgttgcgtttacactcgttaagctgtctatcaagatccatgattctatctctaagacgttgcatctctctttccatatcagcattgctttcattattacgtctgcagtcactcaactgtctttcaatatctgagattctatctctaagacgtcgcatctctctctgtttcggcattggtttcattattacgtttacagtcgttcaactgtctttcaagatctgatattctagattggagtctgctaatctctgtagcattttcacggcattcactcagttgtctttcaagatctgaaattttagattggagtctgctaatctctgtaagatttcctcctccgctctcgatgcagtcggtcaacttattctctagttctctaatacgcgaacgcagtgcatcaacttcttgcgtgtcttcctggttgcgtgtacattcatcgagatctctaacgcgtcgtcgttcttcctcaagttctctgcgtactacagaaagcgtgtccctatcttgttgatatttagcaatttctgattctagagtactgattttgcttacgtagttactaatagttgtcttggccttatcaagatcctccttgtatttgtcgcattccttgatatccctacgaagtctggacagttcccattcgacattacgacgtttatcgatttcagctcggagatcgtcatcgcgttgttttagccacatacgactgagttcaagttctcgttgacaagatccatctacttttccattcctaatagtatccagttccttttctagttctgaacgcatttctcgttccctatcaagcgattctctcaattctcggatagtcttcttatcaatttctaataaatctgaaccatcatctgtcccattttgaatatccctgtgttctttgatctcttttgtaagtcggtcgattctttcggttttataaacagaatccctttccaaagtcctaatcttactgagtttatcactaagttctgcattcaattcggtgagttttctcttggcttcttccaactctgttttaaactctccactatttccgcattcttcctcgcatttatctaaccattcaattagtttattaataactagttggtaatcagcgattcctatagccgttcttgtaattgtgggaacataattaggatcttctaatggattgtatggcttgatagcatcatctttatcattattagggggatggacaaccttaattggttggtcctcatctcctccagtagcgtgtggttcttcaataccagtgttagtaataggcttaggcaaatgcttgtcgtacgcgggcacttcctcatccatcaagtatttataatcgggttctacttcagaatattcttttctaagagacgcgacttcgggagttagtagaagaactctgtttctgtatctatcaacgctggaatcaatactcaagttaaggatagcgaatacctcatcgtcatcatccgtatcttctgaaacaccatcatatgacatttcatgaagtctaacgtattgataaatagaatcagatttagtattaaacagatccttaacctttttagtaaacgcatatgtatattttagatctccagatttcataatatgatcacatgccttaaatgtcagtgcttccatgatataatctggaacactaatgggtgacgaaaaagatacagcaccatatgctacgttgataaataaatctgaaccactaagtagataatgattaatgttaagaaagaggaaatattcagtgtataggtatgtcttggcgtcatatcttgtactaaacacgctaaacagtttgttaatgtgatcaatttccaatagattaattagagcagcgggaataccaacaaacatattaccacatccgtattttctatgaatatcacatatcatgttaaaaaatcttgatagaagagcgaatatctcgtctgacttaatgagtcgtagttcagcagcaacataagtcataactgtaaatagaacatactttcctgtagtgttgattctagactccacatcaacaccattattaaaaatagttttatatacatctttaatctgctctccgttaatcgtcgaacgttctagtatacggaaacactttgatttcttatctgtagttaatgacttagtgatatcacgaagaatattacgaattacatttcttgtttttcttgagagacctgattcagaactcaactcatcgttccatagtttttctacctcagtggcgaaatctttggagtgcttggtacatttttcaataaggttcgtgacctccatttattataaaaaatttattcaaaacttaactacaatcgggtaattataagatcgtagatctcccatgtggcggaatactaccatctatcgcatgtggatggacagtaggtaatggccatgggaacagtaatgtttgcatatttatctttcttgctagtattactgcatattgtcccaatgtttcgatgtgatgttctaacctatcaactgccgctgtatcacaacaatagtgtccgatgaaattaagattatgatccaatgtgtttaatatatgattatcaagtcttatacgatccgcgtcttttttgacaggatcaggttcttctacaggaagaagtttcggcctcttatgatattcatgtctgggaaacggtggtctagggtgaggctccggtatcggagtgggttttggattataatcatcatcgtctatgacatcatcttcgacttcgatatttattttgctatcttgatgatgtcctgtatcagttgcattttcagcactcgactgaatattagcgcattcattgtctattattaccatatttctaaacccaaaatgtatgtgttgaacatcagtactatcgttgatgagtcttatagcatgaattcgcttatcgttatcgggtttatcttctgtcaccttagcaattccttttttattaaactctacataatcatatccatttctattgtttgttctaatataaacgagtatagcatcattgctaaatttttcaatagtatcaaaaacagaatatcctaaaccatataatatatattcaggaacactcaaactaaatgtccaggattctcctaaatacgtaaactttaatagtgcgaaatcattcaaaaatctaccacttatagatagatagtacataaatgcgtatagtagtctacctatctctttattatgaaaaccggcattacgatcatatatgtcgtgatatacctgtgatccgtttacgttaaaccataaatacatgggtgatcctataaacatgaatttatttctaattctcagagctatagttaattgaccgtgtaatatttgcttacatgcatacttgatacgcttattaataagatttttatcattgctcgttatttcagaatcgtatatataaggagtaccatcgtgattcttaccagatattatacaaaatactatatataaaatatattgacccacgttagtaatcatataaatgtttaacgttttaaattttgtattcaatgatccattatcatacgctatcatggtcttgtaatattcattctttaaaatataatattgtgttagccattgcattggagctcctaatggagattttctattctcatccattttaggataggctttcataaagtccctaataacttcgtgaataatgtttctatgttttctactgatgcatgtatttgcttcgatttttttatcccatgtttcatctatcatagatttaaacgcagtaatgctcgcaacattaacatcttgaaccgttggtacaattccgttccataaatttataatgttcgccatttatataactcattttttgaatatacttttaattaacaaaagagttaagttactcatatggacgccgtccagtctgaacatcaatctttttagccagagatatcatagccgctcttagagtttcagcgtgattttccaacctaaatagaacttcatcgttgcgtttacaacacttttctatttgttcaaactttgttgttacattagtaatctttttttccaaattagttagccgttgtttgagagtttcctcattgtcgtcttcatcggctttaacaattgcttcgcgtttagcctctggctttttagcagcctttgtagaaaaaaattcagttgctggaattgcaagatcgtcatctccggggaaaagagttccgtccatttaaagtacagattttagaaactgacactctgcgttatttatatttggtacaacacatggattataaatattgatgttaataacatcagaaaatgtaaagtctatacattgttgcatcgtgttaaattttctaatggatctagtattattgggtccaacttctgcctgaaatccaaatatggaagcggatacaaaaccgtttcctggataaaccacacatctccacttttgctttacatcagaaattgtgtcgttgacatcttgaactctcctatctaatgccggtgttccacctatagattttgaatattcgaatgctgcatgagtagcattaaattccttaatattgccataattttcatatattgagtaaccctggataaaaagtaaacacaccgcagccgtcgctaccacaataaaaaaaattgatagagagttcatttataatctattagaagctgacaaaatttttttacacgcatcagacaatgctttaataaatagttcaacatctacttttgtcatatcgaaccgatggtatgattctaacctagaattacatccgaaaaagttgactatgttcatagtcattaagtcattaacaaacaacattccagactctggattataagacgatactgtttcgtcacaattacctaccttaatcatgtgattatgaatattggctattagagcaccttctaagaaatctataatatctttgaaacacgatttaaaatcaaaccacgaatatacttctacgaagaaagttagtttacccataggagaaataactataaatggagatctaaatacaaaatccggatctatgatagttttaacattattatattctctattaaatacctccacatctaaaaatgttaattttgaaactatgtcttcgtttattaccgtacctgaactaaacgctataagctctattgtttgagaactctttaaacgatattcttgaaatacatgtaacaaagtttcctttaactcggtcggtttatctaccatagttacagaatttgtatccttatctataatataataatcaaaatcgtataaagttatataattatcgcgttcagattgtgatcttttcaaatagactaaaaaccccatttctctagtaagtatcttatgtatatgtttgtaaaatatcttcatggtgggaatatgctctaccgcagttagccattcctcattgacagcggtagatgtattagacaaaactattccaatgtttaacaagggccattttacgagattattaaatccttgtttgataaatgtagccaatgagggttcgagttcaacgacgattgaattctcttcccgcggatgctgcatgatgaacgacgggatgttgttcgattgatttggaattctttttcgactttttgtttatattaaatattttaaaatttatagcggatagcaattcatgtaccacggataatgtagacgcgtattgcgcatcgatatctttattattagataaatttatcaataaatgtgagaagtttgcctcgttaaggtcttccatttaaatattatataaacatttgtgtttgtatcttattcgtcttttatggaatagttttttactagtaaagctgcaattacacactttgtccgtaaaacataaatataaacaccagcttttatcaatcgttccaaaaagtcgacggcggacatttttaacatggcatctattttaaatacacttaggtttttggaaaaaacatcattttataattgtaacgattcaataactaaagaaaagattaagattaaacataagggaatgtcatttgtattttataagccaaagcattctaccgttgttaaatacttgtctggaggaggtatatatcatgatgatttggttgtattggggaaggtaacaattaataatctaaagatgatgctattttacatggatttatcatatcatggagtgacaagtagtggagcaatttacaaattgggatcgtctatcgatagactttctctaaataggactattgttacaaaagttaataattatgatgatacattttttgacgacgatgattgatcgctattgcacaattttgtttttgtactttctaatatagtgtttaggttctttttcatatgagaatattgatttactaaaatatctatgtttaacttttgttctatgacgtccttatcggcggtatcggtacatatacgtaattcaccttcacaaaatacggagtcttcgataataatagccaatcgattattggatctagctgtctgtatcatattcaacatgtttaatatatcctttcgtttcccctttacaggcatcgatcgtagcatattttccgcgtctgatatggaaatgttaaaactacaaaaatgcgtaatgttagcccgtcctaatattggtacgtgtctataagtttggcatagtagaataatagacgtgtttaaatgccttccaaagtttaagaattctattagagtattgcattttgatagtttatcgcctacatcatcaaaaataagtaaaaagtgtgctgattttttatgattttgtgcgacagcaatacatttttctatgttacttttagttcgtatcagattatattctagagattcctgactactaacgaaattaatatgatttggccaaatgtatccatcataatctgggttataaacgggtgtaaacaagaatatatgtttatattttttaactagtgtagaaaacagagatagtaaatagatagtttttccagatccagatcctcctgttaaaaccattctaaacggcatttttaataaattttctcttgaaaattgtttttcttggaaacaattcataattatatttacagttactaaattaatttgataataaatcaaaatatggaaaactaaggttgttagtagggaggagaacaaagaaggcacatcgtgatataaataacatttattatcatgatgacaccagaaaacgacgaagagcagacatctgtgttctccgctactgtttacggagacaaaattcagggaaagaataaacgcaaacgcgtgattggtctatgtattagaatatctatggttatttcactactatctatgattaccatgtccgcgtttctcatagtgcgcctaaatcaatgcatgtctgctaacgaggctgctattactgacgccgctgttgccgttgctgctgcatcatctactcatagaaaggttgcgtctagcactacacaatatgatcacaaagaaagctgtaatggtttatattaccagggttcttgttatatattacattcagactaccagttattctcggatgctaaagcaaattgcactgcggaatcatcaacactacccaataaatccgatgtcttgactacctggctcattgattatgttgaggatacatggggatctgatggtaatccaattacaaaaactacatccgattatcaagattctgatgtatcacaagaagttagaaagtatttttgtgttaaaacaatgaactaatatttatttttgtacattaataaatgaaatcgcttaatagacaaactgtaagtaggtttaagaagttgtcggtgccggccgctataatgatgatactctcaaccattattagtggcataggaacatttctgcattacaaagaagaactgatgcctagtgcttgcgccaatggatggatacaatacgataaacattgttatttagatactaacattaaaatgtctacagataatgcggtttatcagtgtcgtaaattacgagctagattgcctagacctgatactagacatctgagagtattgtttagtattttttataaagattattgggtaagtttaaaaaagaccaatgataaatggttagatattaataatgataaagatatagatattagtaaattaacaaattttaaacaactaaacagtacgacggatgctgaagcgtgttatatatacaagtctggaaaactggttaaaacagtatgtaaaagtactcaatctgtactatgtgttaaaaaattctacaagtgacaacaaaaaatgaattaataataagtcgttaacgtacgccgccatggacgccgcgtttgttattactccaatgggtgtgttgactataacagatacattgtatgatgatctcgatatctcaatcatggactttataggaccatacattataggtaacataaaaactgtccaaatagatgtacgggatataaaatattccgacatgcaaaaatgctactttagctataagggtaaaatagttcctcaggattctaatgatttggctagattcaacatttatagcatttgtgccgcatacagatcaaaaaataccatcatcatagcatgcgactatgatatcatgttagatatagaagataaacatcagccattttatctattcccatctattgatgtttttaacgctacaatcatagaagcgtataacctgtatacagctggagattatcatctaatcatcaatccttcagataatctgaaaatgaaattgtcgtttaattcttcattctgcatatcagacggcaatggatggatcataattgatgggaaatgcaatagtaattttttatcataaaagttgtaaagtaaataataaaacaataaatattgaactagtagtacgtatattgagcaatcagaaatgatgctggtacctcttatcacggtgaccgtagttgcgggaacaatattagtatgttatatattatatatttgtaggaaaaagatacgtactgtctataatgacaataaaattatcatgacaaaattaaaaaagataaagagttctaattccagcaaatctagtaaatcaactgatagcgaatcagactgggaggatcactgtagtgctatggaacaaaacaatgacgtagataatatttctaggaatgagatattggacgatgatagcttcgctggtagtttaatatgggataacgaatccaatgttatggcgcctagcacagaacacatttacgatagtgttgctggaagcacgctgctaataaataatgatcgtaatgaacagactatttatcagaacactacagtagtaattaatgaaacggagactgttgaagtacttaatgaagataccaaacagaatcctaactattcatccaatcctttcgtaaattataataaaaccagtatttgtagcaagtcaaatccgtttattacagaacttaacaataaatttagtgagaataatccgtttagacgagcacatagcgatgattatcttaataagcaagaacaagatcatgaacacgatgatatagaatcatcggtcgtatcattggtgtgattagtttcctttttataaaattgaagtaatatttagtattattgctgccgtcacgttgtacaaatggagatattccctgtattcggcatttctaaaattagcaattttattgctaataatgactgtagatattatatagatacagaacatcaaaaaattatatctgatgagatcaatagacagatggatgaaacggtacttcttaccaacatcttaagcgtagaagttgtaaatgacaatgagatgtaccatcttattcctcatagattatcgacgattatactctgtattagttctgtcggaggatgtgttatctctatagataatgacatcaatggcaaaaatattctaacctttcccattgatcatgctgtaatcatatccccactgagtaaatgtgtcgtagttagcaagggtcctacaaccatattggttgttaaagcggatatacctagcaaacgattggtaacatcgtttacaaacgacatactatatgtaaacaatctgtcactgattaattatttgccgttgtctgtattcattattagacgagtcaccgactatttggatagacacatatgcgatcagatatttgctaataataagtggtattcccttataaccatcgacgataagcaatatcctattccatcaaactgtataggtatgtcctctgccaagtacataaattctagcatcgagcaagatactttaatccatgtttgtaacctcgagcatccgttcgactcagtatacaaaaaaatgcagtcgtacaattctctacctatcaaggaacaaatattgtacggtagaattgataatataaatatgagcattagtatttctgtggattaatagatttctagtatggggatcattaatcatctctaatctctaaatacctcataaaacgaaaaaaaagctattatcaaatactgtacggaatggattcattctcttctctttttatgaaactctgttgtatatctactgataaaactggaagcaaaaaatctgatagaaagaataagaataagatcaaggattatatggaacacgattattataaaataacaatagttcctggttcctcttccacgtctactagctcgtggtattatacacatgcctagtaatagtctctttgcgttgacggaaagcagactagaaataacaggctaaaatgttcagacaccataatagttcccaacccagataataacagagttccatcaacacattcctttaaactcaatcccaaacccaaaaccgttaaaatgtatccggccaattgatagtagataatgaggtgtacagcgcatgataatttacacagtaaccaaaatgaaaatactttagtaattataagaaatatagacggtaatgtcatcatcaacaatccgataatatgcctgagagtaaacattgacggataaaacaaaaatgctccgcataactctatcatggcaataacacaaccaaatacttgtaagattcctaaattagtagaaaatacaacgaatatcgatgtataagtgatctcgagaaataataagaataaagtaatgcccgtaaagataaacatcaacattgtttggtaatcattaaaccaattagtatgaagttgaactaatttcacagtagattttattccagtgttatcctcgcatgtataagtacctggtaagatatctttatattccataatcaatgagacatcactatctgataacgaatgaagtctagcactagtatgccatttacttaatattgtcgtcttggaagttttattataagttaaaatatcatggttatccaatttccatctaatatactttgtcggattatctatagtacacggaataatgatggtatcattacatgctgtatactctatggtctttgtagttgttataacaaccaacgtatagaggtatatcaacgatattctaactcttgacattttttatttatttaaaatgatacctttgttatttattttattctattttgctaacggtattgaatggcataagtttgaaacgagtgaagaaataatttctacttacttattagacgacgtattatacacgggtgttaatggggcggtatacacattttcaaataataaactaaacaaaactggtttaactaataataattatataacaacatctataaaagtagaggatgcggataaggatacattagtatgcggaaccaataacggaaatcccaaatgttggaaaatagacggttcagacgacccaaaacatagaggtagaggatacgctccttatcaaaatagcaaagtaacgataatcagtcacaacggatgtgtactatctgacataaacatatcaaaagaaggaattaaacgatggagaagatttgacggaccatgtggttatgatttattcacggcggataacgtaattccaaaagatggtttacgaggagcattcgtcgataaagacggtacttatgacaaagtttacattcttttcactgatactatcggctcaaagagaattgtcaaaattccgtatatagcacaaatgtgcctaaacgacgaaggtggtccatcatcattgtctagtcatagatggtcgacgtttctcaaagtcgaattagaatgtgatatcgacggaagaagttatagacaaattattcattctagaactataaaaacagataatgatacgatactatatgtattcttcgatagtccttattccaagtccgcattatgtacctattctatgaataccattaaacaatctttttctacgtcaaaattggaaggatatacaaagcaattgccgtctccagctcctggtatatgtttaccagctggaaaagttgttccacataccacgtttgaagtcatagaacaatataatgtactagatgatattataaagcctttatctaaccaacctatcttcgaaggaccgtctggtgttaaatggttcgatataaaggagaaggaaaatgaacatcgggaatatagaatatacttcataaaagaaaattctatatattcgttcgatacaaaatctaaacaaactcgtagctcgcaagtcgatgcgcgactattttcagtaatggtaactgcgaaaccgttatttatagcagatatagggataggagtaggaatgccacaaatgaaaaaaatacttaaaatgtaatcttaatcgagtacaccacacgacaatgaacaaacataagacagattatgctggttatgcttgctgcgtaatatgcggtctaattgtcggaattatttttacagcgacactattaaaagttgtagaacgtaaattagttcatacaccattaatagataaaacgataaaagatgcatatattagagaagattgtcctactgactggataagctataataataaatgtatccatttatctactgatcgaaaaacctgggaggaaggacgtaatgcatgcaaagctctaaattcaaattcggatctaattaagatagagactccaaacgagttaagttttttaagaagccttagacgaggctattgggtaggagaatccgaaatattaaaccagacaaccccatataattttatagctaagaatgccacgaagaatggaactaaaaaacggaaatatatttgtagcacaacgaatactcccaaactgcattcgtgttacactatataacaattacactacatttttatcataccactacttcggttagatgttttagaaaaaaataaatatcgccgtaccgttcttgtttttataaaaataacaattaacaattatcaaattttttctttaatattttacgtggttgaccattcttggtggtaaaataatctcttagtgttggaatggaatgctgtttaatgtttccacactcatcgtatattttgacgtatgtagtcacatcgtttacgcaatagtcagactgtagttctatcatgcttcctacatcagaaggaggaacagttttaaagtctcttggttttaatctattaccgttagttttcatgaaatcctttgttttatccacttcacattttaaataaatgtccactatacattcttttgttaattttactagatcgtcatgggtcatagaatttataggttccgtagtccatggatccaaactagcaaacttcgcgtatacggtatcgcgattagtgtatacaccaactgtatgaaaattaagaaaacagtttaataaatcaacagaaatatttaatcctccgtttgatacagatgcgccatatttatggatttcggattcacacgttgtttgtctgaggtgttcgtctagtgttgcttctacgtaaacttcgattcccatatattctttattgtcagaatcgcataccgatttatcatcatacactgtttgaaaactaaatggtatacacatcaaaataataaataataacgagtacattctgcaatattgttatcgtaattggaaaaatagtgttcgagtgagttggattatgtgagtattggattgtatattttattttatattttgtaataagaataaaatgctaatgtcaagtttattccaatagatgtcttattaaaaacatatataataaataacaatggctgaatggcataaaattatcgaggatatctcaaaaaataataagttcgaggatgccgccatcgttgattacaagactacaaagaatgttctagctgctattcctaacagaacatttgccaagattaatccgggtgaaattattcctctcatcactaatcgtaatattctaaaacctcttattggtcagaaatattgtattgtatatactaactctctaatggatgagaacacgtatgctatggagttgcttactgggtacgcccctgtatctccgatcgttatagcgagaactcataccgcacttatatttttgatgggtaagccaacaacatccagacgtgacgtgtatagaacgtgtagagatcacgctacccgtgtacgtgcaactggtaattaaaataaaaagtaatattcatatgtagtgtcaattttaaatgatgatgatgaaatggataatatccatattgacgatgtcaataatgccggtattggcatacagttcatcgatttttagatttcattcagaggatgtggaattatgttatgggcatttgtattttgataggatctataatgtagtaaatataaaatataatccgcatattccatatagatataattttattaatcgcacgttaaccgtagatgaactagacgataatgtcttttttacacatggttattttttaaaacacaaatatggttcacttaatcctagtttgattgtctcattatcaggaaacttaaaatataatgatatacaatgctcagtaaatgtatcgtgtctcattaaaaatttggcaacgagtacatctactatattaacatctaaacataagacttattctctacatcggtccacgtgtattactataataggatacgattctattatatggtataaagatataaatgacaagtataatgacatctatgattttactgcaatatgtatgctaatagcgtctacattgatagtgaccatatacgtgtttaaaaaaataaaaatgaactcttaattatgctatgctattagaaatggataaaatcaaaattacggttgattcaaaaattggtaatgttgttaccatatcgtataacttggaaaagataactattgatgtcacacctaaaaagaaaaaagaaaaggatgtattattagcgcaatcagttgctgtcgaagaggcaaaagatgtcaaggtagaagaaaaaaatattatcgatattgaagatgacgatgatatggatgtagaaagcgcgtaatacgatctataaaaataagtatataaatactttttatttactgtactcttactgtgtagtggtgataccctactcgattatttttttaaaaaaaaaatacttattctgattcttctagccatttccgtgttcgtttgaatgccacatcgacgtcaaagataggggagtagttgaaatctagttctgcattgttggtacgcacctcaaatgtagtgttggatatcttcaacgtatagttgttgagtagtgatggttttctaaatagaattctcttcatatcattcttgcacgcgtacatttttagcatccatcttggaatcctagatccttgttctattcccaatggtttcatcaatagaagattaaacatatcgtacgaacacgatggagagtaatcgtagcaaaagtaagcatttcctttaatcttagatcccggatactggatatattttgcagccaacacgtgcatccatgcagcatttcctacatatacccggctatgcaccgcgtcatcatcgactgtacgatacataatgttaccgtgttgcttacattgctcgtaaaagactttcatcaatttgtctccttctccgtaaattccagtgggtcttaggcaacaagtatacaattttgctccattcatgattacggaattattggctttcataaccagttgctcggccatacgtttactttttgcgtatacatgtcctggtgatatatcataaagggtatgctcatggccgatgaatggatcaccgtgtttattgggtcctattgcttccatgctactagtatagatcaaatacttgattcctaggtccacacaagctgccaaaatagtctgtgttccataatagtttactttcatgatttcattatcggtgtattttccaaatacatccactagagcagccgtatgaataatcagatttaccccatctagcgcttctctcaccttatcaaagtcgtttatatcacattgtatatagtttataaccttaactttcgaggttattggttgtggatcttctacaatatctatgactctgatttcttgaacatcatctgcactaattaacagttttactatatacctgcctagaaatccggcaccaccagtaaccgcgtacacggccattgctgccactcataatatcagactacttattctattttactaaataatggctgtttgtataatagaccacgataatatcagaggagttatttactttgaaccagtccatggaaaagataaagttttaggatcagttattggattaaaatccggaacgtatagtttgataattcatcgttacggagatattagtcaaggatgtgattccataggcagtccagaaatatttatcggtaacatctttgtaaacagatatggtgtagcatatgtttatttagatacagatgtaaatatatttacaattattggaaaggcgttatctatttcaaaaaatgatcagagattagcgtgtggagttattggtatttcttacataaatgaaaagataatacattttcttacaattaacgagaatggcgtttgatatatcagttaatgcgtctaaaacaataaatgcattagtttacttttctactcagcaaaataaattagtcatacgtaatgaagttaatgatacacactacactgtcgaatttgatagggacaaagtagttgacacgtttatttcatataatagacataatgacaccatagagataagaggggtgcttccagaggaaactaatattggttgcgcggttagtatgacttacttgtataataagtatagttttaaactgattttagcagaatatataagacacagaaatactatatccggcaatatttattcggcattgatgacactagatgatttggctattaaacagtatggagacattgatctattatttaatgagaaacttaaagtagactccgattcgggactatttgactttgtcaactttgtaaaggatatgatatgttgtgattctagaatagtagtagctctatctagtctagtatctaaacattgggaattgacaaataaaaaatataggtgtatggcattagccgaacatatatctgatagtattccaatatctgagctatctagactacgatacaatctatgtaagtatctacgcggacacactgagagcatagaggataaatttgattattttgaagacgatgattcgtctacatgttctgccgtaaccgacagggaaacggatgtataattttttttatagcgtgaaggatatgataaaaaatataattgttgtatttatcccattccaatcaccttatatgattctgtaacacaataaaggagtcttatagatgtatagaggtcagatactggtttgataaactgtttattccacataagtatgtttgactttatggttagacccgcatactttaacaaatcactgaaaattggagttaggtattgacctctcagaatcagttgccgttctggaacattaaatgtattttttatgatatactccaacgcatttatgtgggcatacaacaagtcattactaatggaatattccaagagttttagttgtctagtatttaacaagagaagagatttcaacagactgtttatgaactcgaatgccgcctcattgtcgcttatattgatgatgtcgaattctcccaatatcatcaccgatgagtagctcatcttgttatcgggatccaagttttctaaagatgtcattaaaccctcgatcatgaatggatttatcatcatcgtttttatgttggacatgagcttagtccgtttgtccacatctatagaagatgatttctgaattatttcatatatctctctctttaactccaggaacttgtcaggatggtctactttaatatgttctcgtctaagagatgaaaatctttggatggttgcacgcgacttttctctaaaggatgacgttgcccaagatcctctcttaaatgaatccatcttatccttggacaagatggacagtctattttccttagatggtttaatatttttgttacccatgatctataaaggtagacctaatcgtctcggatgaccatatatttattttcagttttattatacgcataaattgtaaaaaatatgttaggtttacgaaaatgtctcgtggggcattaatcgtttttgaaggattggacaaatctggaaaaacaacacaatgtatgaacatcatggaatcaataccttcaaacacaataaaataccttaactttcctcagagatccactgtcactggaaagatgatagatgactatctaactcgtaaaaaaacctataatgatcatatagttaatctattattttgtgcaaatagatgggagtttgcatcttttatacaagaacaactagaacagggaattactttaatagttgatagatacgcattttctggagtagcgtatgccgccgctaaaggcgcgtcaatgactctcagtaagagttatgaatctggattgcctaaacccgacttagttatattcttggaatctggtagcaaagaaattaatagaaacgtcggtgaggaaatttatgaagatgttacattccaacaaaaggtattacaagaatataaaaaaatgattgaagaaggagatattcattggcaaattatttcttctgaattcgaggaagatgtaaagaaggagttgattaagaatatagttatagaggctatacacacggttactggaccagtggggcaactgtggatgtaatagtgaaattacattttttataaatagatgttagtacagtgttataaatggatgaagcatattactctggcaacttggaatcagtactcggatacgtgtccgatatgcataccgaactcgcatcaatatctcaattagttattgccaagatagaaactatagataatgatatattaaacaaggacattgtaaattttatcatgtgtagatcaaacttggataatccatttatctctttcctagatactgtatatactattatagatcaagagaactatcagactgagttgattaattcattagacgacaatgaaattatcgattgtatagttaataagtttatgagcttttataaggataacctagaaaatatagtagatgctatcattactctaaaatatataatgaataatccagattttaaaactacgtatgccgaagtactcggttccagaatagccgatatagatattaaacaagtgatacgtaagaatatactacaattgtctaataatatccgcgaacgatatttgtgaaaatattaaaaaaaaatactttttttattaaatgacgtcttttcgtgaatttagaaaattatgctgtgctatatatcacgcatcaggatataaagaaaaatctaaattaattagagactttataacagatagggatgataaatatttgatcattaagctattgcttcccggattagacgatagaatttataacatgaacgataaacaaattataaaattatatagtataatatttaaacaatctcaggaagatatgctacaagatttaggatacggatatataggagacactattaggactttcttcaaagagaacacagaaatccgtccacgagataaaagcattttaactttagaagaagtggatagttttttaactacgttatcatccgtaactaaagaatcgcatcaaataaaattattgactgatgtagcatctgtttgtacatgtaatgatttaaaatgtgtagtcatgcttattgataaagatctaaaaattaaagcgggtcctcggtacgtacttaacgctattagtcctaatgcctatgatgtgtttagaaaatctaataacttgaaagagataatagaaaattcatctaaacaaaatctagactctatatctatttctgttatgactccaattaatcccatgttagcggaatcgtgtgattctgtcaataaggcgtttaaaaaatttccatcaggaatgtttgcggaagtcaaatacgatggtgaaagagtacaagttcataaaaataataacgagtttgccttctttagtagaaacatgaaaccagtactctctcataaagtggattatctcaaagaatacataccgaaagcatttaaaaaagctacgtctatcgtattggattctgaaattgttcttgtagacgaacataatgtaccgctcccgtttggaagtttaggtatacacaaaaagaaagaatataaaaactctaacatgtgtttgttcgtgtttgactgtttgtactttgatggattcgatatgacggacattccattgtacgaacgaagatcttttctcaaagatgttatggttgaaatacccaatagaatagtattctcagagttgacgaatattagtaacgagtctcagttaactgacgtattggatgatgcactaacgagaaaattagaaggattggtcttaaaagatattaatggagtatacgaaccgggaaagagaagatggttaaaaataaagcgagactatttgaacgagggttccatggcagattctgccgatttagtagtactaggtgcctactatggtaaaggagcaaagggtggtatcatggcagtctttctaatgggttgttacgacgatgaatccggtaaatggaagacggttaccaagtgttcaggacacgatgataatacgttaagggagttgcaagaccaattaaagatgattaaaattaacaaggatcccaaaaaaattccagagtggttagtagttaataaaatctatattcccgattttgtagtagaggatccgaaacaatctcagatatgggaaatttcaggagcagagtttacatcttccaagtcccataccgcaaatggaatatccattagatttcctagatttactaggataagagaggataaaacgtggaaagaatctactcatctaaacgatttagtaaacttgactaaatcttaatagttacatacaaactgaaaattaaaataacactatttagttggtggtcgccatggatggtgttattgtatactgtctaaacgcgctagtaaaacatggcgaggaaataaatcatataaaaaatgatttcatgattaaaccatgttgtgaaagagtttgtgaaaaagtcaagaacgttcacattggcggacaatctaaaaacaatacagtgattgcagatttgccatatatggataatgcggtatccgatgtatgcaattcactgtataaaaagaatgtatcaagaatatccagatttgctaatttgataaagatagatgacgatgacaagactcctactggtgtatataattattttaaacctaaagatgccattcctgttatcatatctataggaaaggataaagatgtctgtgaactattaatctcatcagacatatcgtgtgcatgcgtggagttaaattcatatcacgtagccattcttcccatggatgtttccttttttaccaaaggaaatgcatcattgattattctcctgtttgatttctctatcgatgcggcacctctcttaagaagtgtaaccgataataatgttattatatctagacaccagcgtctacatgacgagcttccgagttccaattggttcaagttttacataagtataaagtccgactattgttctatattatatatggttgttgatggatctgtgatgcatgcgatagctgataatagaactcacgcaattattagcaaaaatatattagacaatactacgattaacgatgagtgtagatgctgttattttgaaccacagattaggattcttgatagagatgagatgctcaatggatcatcgtgtgatatgaacagacattgtattatgatgaatttacctgatgtaggcgaatttggatctagtatgttggggaaatatgaacctgacatgattaagattgctctttcggtggctggtaatttaataagaaatcgagactacattcccgggagacgaggatatagctactacgtttacggtatagcctctagataatttttttaagcacgaaataaaaaacataattttaaaccaatctatttcatactattttgtgtgatcaccatggacataaagatagatattagtatttctggtgataaatttacggtgactactaggagggaaaatgaagaaagaaaaaaatatctacctctccaaaaagaaaaaactactgatgttatcaaacctgattatcttgagtacgatgacttgttagatagagatgagatgtttactattctagaggaatattttatgtacagaggtctattaggcctcagaataaaatatggacgactctttaacgaaattaaaaaattcgacaatgatgcggaagaacaattcggtactatagaagaactcaagcagaaacttagattaaattctgaagagggagcagataactttatagattatataaaggtacaaaaacaggatatcgtcaaacttactgtatacgattgcatatctatgataggattgtgtgcatgcgtggtagatgtttggagaaatgagaaactgttttctagatggaaatattgtttacgagcgattaaactgtttattgatgatcacatgcttgataagataaaatctatactgcagaatagactagtatatgtggaaatgtcatagaaagttaaaagttaatgagagcaaaaatatataaggttgtattccatatttgttatttttttctgtaatagttagaaaaatacattcgatggtctatctatcagattattatgtgttataaggtactttttctcataataaactagagtatgagtaagatagtgtttttcaaaacatataaatctaaaattgatggatgagatatacagctattaatttcgaaaatatattttaatctgataactttaaacatggatttttaatggtggtttaacgttttaaaaaaagattttgttattgtagtatatgataatattaaaagatggatataaagaatttgctgactgcatgtactattttttacattactacattggctacggcagatatacctacttcgtcactgccacacgctccggtaaacggggcatgtgacgagggagaatatcttgataagaggcataatcaatgttgtaatcagtgtccacctggagaatttgccaaggttagatgtaatggtaacgataacacaaaatgtgaacgctgcccacctcatacatataccgcaatccccaattactctaatggatgtcatcaatgtagaaaatgcccaacaggatcatttgataaggtaaagtgtaccggaacacagaacagtaaatgttcgtgtcttcctggttggtattgcgctactgattcttcacagactgaagattgtcgagattgtataccaaaaaggagatgtccatgcggatactttggtggaatagatgaacaaggaaatcctatttgtaaatcgtgttgtgttggtgaatattgcgactacctacgtaattatagacttgatccatttcctccatgcaaactatctaaatgtaattaattatgattttgatgataatgttaccatacattatatcgctacttggttagtgtattattcagtatgaagacctattaataattacttatcttttgacgatcttgttataattataatataaaaatacttatggcatagtaactcataattgctgacgcgataaattcgtaataatctgttttgttcaaatttttataaggaatctacaggcataaaaataaaaatataatttataatatactcttacagcgcgccatcatgaataacagcagtgaattgattgctgttattaatggatttagaaatagtggacgattttgtgatattaatatagttattaatgatgaaaggataaacgctcacagactcatcctatctggagcctccgaatatttttccattctgttttccaataattttatcgattctaatgaatacgaagttaatctaagtcatttagattatcaaagtgttaacgatttgatcgattacatttatgggatacctttgagcctaactaacgataacgtgaaatatattctttcaaccgctgattttttacaaattggatctgctattacggagtgtgaaaattacatacttaaaaatctttgttctagaaactgtatcgatttctacatatacgctgataaatataataacaagaaaatagaatcagcgtcgtttaacacaatattacaaaatattttgagactcatcaacgatgaaaactttaaatacttaacagaggaatcaatgataaaaattttaagcgatgatatgttaaatataaaaaatgaggatttcgccccactaattctcattaaatggttagagagtactcaacaaccatgcaccgtcgagttacttaaatgcctcagaatatcattgctttccccacaagttataaaatcactttatagtcatcgactggttagttcaatctacgaatgtataacattcttaaacaatatagcattcttggatgaatcatttcctagataccatagcatcgagttgatatctatcggtataagtaattcgcatgataagatttccataaactgctacaatcataaaaaaaatacatgggaaatgatatcttcacgtagatataggtgtagtttcgcagtggccgtcctggataatattatctatatgatgggtggatatgatcagtccccgtatagaagttcaaaggttatagcgtacaatacatgtacaaattcttggatatatgatataccagagctaaaatatcctcgttctaattgtgggggactggctgatgacgaatacatttattgtataggcggcatacgcgatcaggattcatcgttgacatctagtattgatagatggaagccatcaaaaccatattggcagaagtatgctaaaatgcgcgaaccaaaatgtgatatgggggttgcgatgttaaacggattaatatatgttataggtggaatcgttaaaggtgacacgtgtaccgacgcactagagagtttatcagaagatggatggatgaagcatcaacgtcttccaataaaaatgtccaatatgtcgacgattgttcatgatggcaagatttatatatctggaggttacaacaatagtagtgtagttaatgtaatatcgaatctagtccttagctataattcgatatatgatgaatggaccaaattatcatcattaaacattcctagaattaatcccgctctatggtcagcgcataataaattatatgtaggaggaggaatatctgatgatgttcgaactaatacatctgagacatacgacaaagaaaaagattgttggacattggataatggtcacgtgttaccacgcaattatataatgtataaatgcgaaccgattaaacataaatatccattggaaaaaacacagtacacgaatgattttctaaagtatttggaaagttttataggtagttgatagaacaaaatacataattttgtaaaaataaatcactttttatactaatatgacacgattaccaatacttttgttactaatatcattagtatacgctacaccttttcctcagacatctaaaaaaataggtgatgatgcaactctatcatgtaatcgaaataatacaaatgactacgttgttatgagtgcttggtataaggagcccaattccattattcttttagctgctaaaagcgacgtcttgtattttgataattataccaaggataaaatatcttacgactctccatacgatgatctagttacaactatcacaattaaatcattgactgctagagatgccggtacttatgtatgtgcattctttatgacatcaactacaaatgacactgataaagtagattatgaagaatactccacagagttgattgtaaatacagatagtgaatcgactatagacataatactatctggatctacacattcaccggaaactagttctaagaaacctgattatatagataattctaattgctcgtcggtattcgaaatcggtacccggggatcagcttgcatgcctgcagcaattcccgaggctgtagccgacgatggtgcgccaggagagttgttgattcattgtttgcctccctgctgcggtttttcaccgaagttcatgccagtccagcgtttttgcagcagaaaagccgccgacttcggtttgcggtcgcgagtgaagatccctttcttgttaccgccaacgcgcaatatgccttgcgaggtcgcaaaatcggcgaaattccatacctgttcaccgacgacggcgctgacgcgatcaaagacgcggtgatacatatccagccatgcacactgatactcttcactccacatgtcggtgtacattgagtgcagcccggctaacgtatccacgccgtattcggtgatgataatcggctgatgcagtttctcctgccaggccagaagttctttttccagtaccttctctgccgtttccaaatcgccgctttggacataccatccgtaataacggttcaggcacagcacatcaaagagatcgctgatggtatcggtgtgagcgtcgcagaacattacattgacgcaggtgatcggacgcgtcgggtcgagtttacgcgttgcttccgccagtggcgcgaaatattcccgtgcaccttgcggacgggtatccggttcgttggcaatactccacatcaccacgcttgggtggtttttgtcacgcgctatcagctctttaatcgcctgtaagtgcgcttgctgagtttccccgttgactgcctcttcgctgtacagttctttcggcttgttgcccgcttcgaaaccaatgcctaaagagaggttaaagccgacagcagcagtttcatcaatcaccacgatgccatgttcatctgcccagtcgagcatctcttcagcgtaagggtaatgcgaggtacggtaggagttggccccaatccagtccattaatgcgtggtcgtgcaccatcagcacgttatcgaatcctttgccacgcaagtccgcatcttcatgacgaccaaagccagtaaagtagaacggtttgtggttaatcaggaactgttcgcccttcactgccactgaccggatgccgacgcgaagcgggtagatatcacactctgtctggcttttggctgtgacgcacagttcatagagataaccttcacccggttgccagaggtgcggattcaccacttgcaaagtcccgctagtgccttgtccagttgcaaccacctgttgatccgcatcacgcagttcaacgctgacatcaccattggccaccacctgccagtcaacagacgcgtggttacagtcttgcgcgacatgcgtcaccacggtgatatcgtccacccaggtgttcggcgtggtgtagagcattacgctgcgatggattccggcatagttaaagaaatcatggaagtaagactgctttttcttgccgttttcgtcggtaatcaccattcccggcgggatagtctgccagttcagttcgttgttcacacaaacggtgatacgtacacttttcccggcaataacatacggcgtgacatcggcttcaaatggcgtatagccgccctgatgctccatcacttcctgattattgacccacactttgccgtaatgagtgaccgcatcgaaacgcagcacgatacgctggcctgcccaacctttcggtataaagacttcgcgctgataccagacgttgcccgcataattacgaatatctgcatcggcgaactgatcgttaaaactgcctggcacagcaattgcccggctttcttgtaacgcgctttcccaccaacgctgatcaattccacagttttcgcgatccagactgaatgcccacaggccgtcgagttttttgatttcacgggttggggtttctacaggacgtaacattctagtcgaggaattcatttatagcatagaaaaaaacaaaatgaaattctactatatttttacatacatatattctaaatatgaaagtggtgattgtgactagcgtagcatcgcttctagacatctatatactatatagtaataccaatactcaagactacgaaactgatacaatctcttatcatgtgggtaatgttctcgatgtcgatagccatatgcccggtagttgcgatatacataaactgatcactaattccaaacccacccgctttttatagtaagtttttcacccataaataataaatacaataattaatttctcgtaaaagtagaaaatatattctaatttattgcacggtaaggaagtagaatcataaagaacagtgacggatccccgatccccgacctgcaggcatgcaagctcgactccggaaccaattactgataatgtagaagatcatacagacaccgtcacatacactagtgatagcattaatacagtaagtgcatcatctggagaatccacaacagacgagactccggaaccaattactgataaagaagatcatacagttacagacactgtctcatacactacagtaagtacatcatctggaattgtcactactaaatcaaccaccgatgatgcggatctttatgatacgtacaatgataatgatacagtaccaccaactactgtaggcggtagtacaacctctattagcaattataaaaccaaggactttgtagaaatatttggtattaccgcattaattatattgtcggccgtggcaattttctgtattacatattatatatataataaacgttcacgtaaatacaaaacagagaacaaagtctagatttttgacttacataaatgtctgggatagtaaaatctatcatattgagcggaccatctggtttaggaaagacagccatagccaaaagactatgggaatatatttggatttgtggtgtcccataccactagatttcctcgtcctatggaacgagaaggtgttgattaccattacgttaacagagaggccatctggaagggaatagccgccggaaactttctagaacatactgagtttttaggaaatatttacggaacttctaaaacagctgtgaatacagcggctattaataatcgtatttgtgtgatggatctaaacatcgacggtgttagaagtcttaaaaatacgtacctaatgccttactcggtgtatataagacctacctctcttaaaatggttgagaccaagcttcgtcgtagaaacactgaagctaacgatgagattcatcgtcgtgtgatgttggcaaaaactgacatggatgaggcaggtgaagccggtctattcgacactattatcattgaagatgatgtgaatttagcatatagtaagttaattcagatactacaggaccgtattagaatgtattttaacactaattagagacttaagacttaaaacttgataattaataatataactcgtttttatatgtgtctatttcaacgtctaatgtattagttaaatattaaaacttaccacgtaaaacttaaaatttaaaatgatatttcattgacagatagatcacacattatgaactttcaaggacttgtgttaactgacaattgcaaaaatcaatgggtcgttggaccattaataggaaaaggtggattcggtagtatttatactactaatgacaataattatgtagtaaaaatagagcccaaagctaacggatcattatttaccgaacaggcattttatactagagtacttaaaccatccgttatcgaagaatggaaaaaatctcacaatataaagcacgtaggtcttatcacgtgcaaggcatttggtctatacaaatccattaatgtggaatatcgattcttggtaattaatagattaggtgcagatctagatgcggtgatcagagccaataataatagactaccaaaaaggtcggtgatgttgatcggaatcgaaatcttaaataccatacaatttatgcacgagcaaggatattctcacggagatattaaagcgagtaatatagtcttagatcaaatagataagaataaattatatctagtggattacggattggtttctaaattcatgtctaatggcgaacatgttccatttataagaaatccaaataaaatggataacggtactctagaatttacacctatagattcgcataaaggatacgttgtatctagacgtggagatctagaaacacttggatattgtatgattagatggttgggaggtatcttaccatggactaagatatctgaaacaaagaattgtgcattagtaagtgccacaaaacagaaatatgttaacaatactgcgactttgttaatgaccagtttgcaatatgcacctagagaattgctgcaatatattaccatggtaaactctttgacatattttgaggaacccaattacgacaagtttcggcacatattaatgcagggtgtatattattaagtgtggtgtttggtcgataaaaattaaaaaataacttaatttattattgatctcgtgtgtacaaccgaaatcatggcgatgttttacgcacacgctctcggtgggtacgacgagaatcttcatgcctttcctggaatatcatcgactgttgccaatgatgtcaggaaatattctgttgtgtcagtttataataacaagtatgacattgtaaaagacaaatatatgtggtgttacagtcaggtgaacaagagatatattggagcactgctgcctatgtttgagtgcaatgaatatctacaaattggaaatccgatccatgatcaagaaggaaatcaaatctctatcatcacatatcgccacaaaaactactatgctctaagcggaatcgggtacgagagtctagacttgtgtttggaaggagtagggattcatcatcacgtacttgaaacaggaaacgctgtatatggaaaagttcaacatgattattctactatcaaagagaaggccaaagaaatgagtgcacttagtccaggacctatcatcgattaccacgtctggataggagattgtatctgtcaagttactgctgtggacgtacatggaaaggaaattatgaaaatgagattcaaaaagggtgcggtgcttccgatcccaaatctggtaaaagttaaacttggggagaatgatacagaaaatctttcttctactatatcggcggcaccatcgaggtaaccacctctctggaagacagcgtgaatcatgtactcatgaaacgtttggaaactatacgccatatgtggtctgttgtatatgatcattttgatattgtgaatggtaaagaatgctgttatgtgcatacgcattcatctaatcaaaatcctataccgagtactgtaaaaacaaatttgtacatgaagactatgggatcatgcattcaaatggattccatggaagctctagagtatcttagcgaactgaaggaatcaggtggatggagtcccagaccagaaatgcaggaatttgaatatccagatggagtggaagacactgaatcaattgagagattggcagaggagttcttcaatagatcagaacttcaggctggtgaatcagtcaaatttggtaattctattaattgttaaacatacatctgtttcagctaagcaactaagaacacgtatacggcagcagcttccttctatactctcatcttttaccaacacaaagggtggatatttgttcattggagttgataataatacacacaaagtatttggattcacggtgggttacgactacctcagactgatagagaatgatatagaaaagcatatcaaaagacttcgtgttgtgcatttctgtgagaagaaagaggacatcaagtacgcgtgtcgattcatcaaggtatataaacctggggatgagactacctcgacatacgtgtgcgctatcaaagtggaaagatgctgttgtgctgtgtttgcagattggccagaatcatggtatatggatactaatggtatcaagaagtattctccagatgaatgggtgtcacatataaaattttaattaatgtaactatagagaacaaataataaggttgtaatatcatatagacaataactaacaattaattagtaactgttatctcttttttaactaaccaactaactatatacctattaatacatcgtaattatagttcttaacatctattaatcattaattcgcttctttaattttttataaactaacattgttaattgaaaagggataacatgttacagaatataaattatatatggatttttttaaaaaggaaatacttgactggagtatatatttatctcttcattatatagcacgcgtgttttccaatttttccacatcccatataatacaggattataatctcgttcgaacatacgagaaagtggataaaacaatagttgattttttatctaggttgccaaatttattccatattttagaatatggggaaaatattctacatatttattctatggatgatgctaatacgaatattataattttttttctagatagagtattaaatattaataagaacgggtcatttatacacaatctcgggttatcatcatccattaatataaaagaatatgtatatcaattagttaataatgatcatccagataataggataagactaatgcttgaaaatggacgtagaacaagacattttttgtcctatatatcagatacagttaatatctatatatgtattttaataaatcatggattttatatagatgccgaagacagttacggttgtacattattacatagatgtatatatcactataagaaatcagaatcagaatcatacaatgaattaattaagatattgttaaataatggatcagatgtagataaaaaagatacgtacggaaacacaccttttatcctattatgtaaacacgatatcaacaacgtggaattgtttgagatatgtttagagaatgctaatatagactctgtagactttaatagatatacacctcttcattatgtctcatgtcgtaataaatatgattttgtaaagttattaatttctaaaggagcaaatgttaatgcgcgtaataaattcggaactactccattttattgtggaattatacacggtatctcgcttataaaactatatttggaatcagacacagagttagaaatagataatgaacatatagttcgtcatttaataatttttgatgctgttgaatctttagattatctattatccagaggagttattgatattaactatcgtactatatacaacgaaacatctatttacgacgctgtcagttataatgcgtataatacgttggtctatctattaaacaaaaatggtgattttgagacgattactactagtggatgtacatgtatttcggaagcagtcgcaaacaacaacaaaataataatggaagtactattgtctaaacgaccatctttgaaaattatgatacagtctatgatagcaattactaaacataaacagcataatgcagatttattgaaaatgtgtataaaatatactgcgtgtatgaccgattatgatactcttatagatgtacagtcgctacagcaatataaatggtatattttaagatgtttcgatgaaatagatatcatgaagagatgttatataaaaaataaaactgtattccaattagttttttgtatcaaagacattaatactttaatgagatacggtaaacatccttctttcgtgaaatgcactagtctcgacgtatacggaagtcgtgtacgtaatatcatagcatctattagatatcgtcagagattaattagtctattatccaagaagctggatcctggagataaatggtcgtgttttcctaacgaaataaaatataaaatattggaaaactttaacgataacgaactatccacatatctaaaaatcttataaacattattaaaatataaaatctaagtaggataaaatcacactacatcattgtttccttttagtgctcgacagtgtatactatttttaacgctcataaataaaaatgaaaacgatttccgttgttacgttgttatgcgtactacctgctgttgtttattcaacatgtactgtacccactatgaataacgctaaattaacgtctaccgaaacatcgtttaatgataaccagaaagttacgtttacatgtgatcagggatatcattctttggatccaaatgctgtctgtgaaacagataaatggaaatacgaaaatccatgcaaaaaaatgtgcacagtttctgattatgtctctgaactatataataaaccgctatacgaagtgaattccaccatgacactaagttgcaacggcgaaacaaaatattttcgttgcgaagaaaaaaatggaaatacttcttggaatgatactgttacgtgtcctaatgcggaatgtcaacctcttcaattagaacacggatcgtgtcaaccagttaaagaaaaatactcatttggggaatatatgactatcaactgtgatgttggatatgaggttattggtgcttcgtacataagttgtacagctaattcttggaatgttattccatcatgtcaacaaaaatgtgatatgccgtctctatctaacggattaatttccggatctacattttctatcggtggcgttatacatcttagttgtaaaagtggttttacactaacggggtctccatcatccacatgtatcgacggtaaatggaatcccatactcccaatatgtgtacgaactaacgaaaaatttgatccagtggatgatggtcccgacgatgagacagatttgagcaaactctcgaaagacgttgtacaatatgaacaagaaatagaatcgttagaagcaacttatcatataatcatagtggcgttgacaattatgggcgtcatatttttaatctccgttatagtattagtttgttcctgtgacaaaaataatgaccaatataagttccataaattgctaccgtaaatataaatccgttaaaataattaataatttaataacaaacaagtatcaaaagattaaagacttatagctagaatcaattgagatgtcttcttcagtggatgttgatatctacgatgccgttagagcatttttactcaggcactattataacaagagatttattgtgtatggaagaagtaacgccatattacataatatatacaggctatttacaagatgcgccgttataccgttcgatgatatagtacgtactatgccaaatgaatcacgtgttaaacaatgggtgatggatacacttaatggtataatgatgaatgaacgcgatgtttctgtaagcgttggcaccggaatactattcatggaaatgtttttcgattacaataaaaatagtatcaacaatcaactaatgtatgatataattaatagcgtatctataattctagctaatgagagatatagaagcgcttttaacgacgatggtatatacatccgtagaaatatgattaacaagttgtacggatacgcatctctaactactattggcacgatcgctggaggtgtttgttattatctgttgatgcatctagttagtttgtataaataattatttcaatatactagttaaaattttaagattttaaatgtataaaaaactaataacgtttttatttgtaataggtgcattagcatcctattcgaataatgagtacactccgtttaataaactgagtgtaaaactctatatagatggagtagataatatagaaaattcatatactgatgataataatgaattggtgttaaattttaaagagtacacaatttctattattacagagtcatgcgacgtcggatttgattccatagatatagatgttataaacgactataaaattattgatatgtataccattgactcgtctactattcaacgcagaggtcacacgtgtagaatatctaccaaattatcatgccattatgataagtacccttatattcacaaatatgatggtgatgagcgacaatattctattactgcagagggaaaatgctataaaggaataaaatatgaaataagtatgatcaacgatgatactctattgagaaaacatactcttaaaattggatctacttatatatttgatcgtcatggacatagtaatacatattattcaaaatatgatttttaaaaatttaaaatatattatcacttcagtgacagtagtcaaataacaaacaacaccatgagatatattataattctcgcagttttgttcattaatagtatacatgctaaaataactagttataagtttgaatccgtcaattttgattccaaaattgaatggactggggatggtctatacaatatatcccttaaaaattatggcatcaagacgtggcaaacaatgtatacaaatgtaccagaaggaacatacgacatatccgcatttccaaagaatgatttcgtatctttctgggttaaatttgaacaaggcgattataaagtggaagagtattgtacgggactatgcgtcgaagtaaaaattggaccaccgactgtaacattgactgaatacgacgaccatatcaatttgtacatcgagcatccgtatgctactagaggtagcaaaaagattcctatttacaaacgcggtgacatgtgtgatatctacttgttgtatacggctaacttcacattcggagattctaaagaaccagtaccatatgatatcgatgactacgattgcacgtctacaggttgcagcatagactttgtcacaacagaaaaagtgtgcgtgacagcacagggagccacagaagggtttctcgaaaaaattactccatggagttcgaaagtatgtctgacacctaaaaagagtgtatatacatgcgcaattagatccaaagaagatgttcccaatttcaaggacaaaatggccagagttatcaagagaaaatttaatacacagtctcaatcttatttaactaaatttctcggtagcacatcaaatgatgttaccacttttcttagcatgcttaacttgactaaatattcataactaatttttattaatgatacaaaaacgaaataaaactgcatattatacactggttaacgcccttataggctctaaccattttcaagatgaggtccctgattatagtccttctgttcccctctatcatctactccatgtctattagacgatgtgagaagactgaagaggaaacatggggattgaaaatagggttgtgtataattgccaaagatttctatcccgaaagaactgattgcagtgttcatctcccaactgcaagtgaaggattgataactgaaggcaatggattcagggatatacgaaacaccgataaattataaaaaaagcaatgtgtccgctgtttccgttaataatactattttcgtaactggcggattattcataaataactctaatagcacgatcgtggttaacaatatggaaaaacttgacatttataaagacaaacaatggtcgattatagaaatgcctatggctagggtatatcacggcattgactcgacatttggaatgttatattttgccggaggtctatccgttaccgaacaatatggtaatttagagaaaaacaacgagatatcttgttacaatcctagaacgaataagtggtttgatatttcatatactatttataagatatccatatcatcattgtgtaaactaaataacgtcttctatgtatttagtaaggacattggatatgtggaaaagtatgatggtgcatggaagttagtacatgatcgtctccccgctataaaggcattatcaacttctccttattgattgaaaatgaaaatataaatagtttttatgtatagcagtattaccctatagttttattgcttactactaacatggatacagatgttacaaatgtagaagatatcataaatgaaatagatagagagaaagaagaaatactaaaaaatgtagaaattgaaaataataaaaacattaacaagaatcatcccaatgaatatattagagaagcactcgttattaataccagtagtaatagtgattccattgataaagaagttatagaatgtatcagtcacgatgtaggaatatagatcatatctactaatttttataatcgatacaaaacataaaaaacaactcgttattacatagcaggcatggaatccttcaagtattgttttgataacgatggcaagaaatggattatcggaaatactttatattctggtaattcaatactctataaggtcagaaaaaatttcactagttcgttctacaattacgtaatgaagatagatcacaaatcacacaagccattgttgtctgaaatacgattctatatatctgtattggatcctttgactatcgacaactggacacgggaacgtggtataaagtatttggctattccagatctgtatggaattggagaaaccgatgattatatgttcttcgttataaagaattcgggaagagtattcgccccaaaggatactgaatcagtcttcgaagcatgcgtcactatgataaacacgttagagtttatacactctcgaggatttacccatggaaaaatagaaccgaggaatatactgattagaaataaacgtctttcactaattgactattctagaactaacaaactatacaagagtggaaactcacatatagattacaacgaggacatgataacttcaggaaatatcaattatatgtgtgtagacaatcatcttggagcaacagtttcaagacgaggagatttagaaatgttgggatattgcatgatagaatggttcggtggcaaacttccatggaaaaacgaaagtagtataaaagtaataaaacaaaaaaaagaatataaaaaatttatagctactttctttgaggactgttttcctgaaggaaatgaacctctggaattagttagatatatagaattagtatacacgttagattattctcaaactcctaattatgacagactacgtaaactgtttatacaagattgaaattatattcttttttttatagagtgtggtagtgttacggatatctaatattaatattagactatctctatcgcgctacacgaccaatatcgattactatggatatcttctatgaaaggagagaatgtatttatttctccagcgtcaatctcgtcagtattgacaatactgtattatggagctaatggatccactgctgaacagctatcaaaatatgtagaaacggaggagaacacggataaggttagcgctcagaatatctcattcaaatccatgaataaagtatatgggcgatattctgccgtgtttaaagattcctttttgagaaaaattggcgataagtttcaaactgttgacttcactgattgtcgcactatagatgcaatcaacaagtgtgtagatatctttactgaggggaaaatcaatccactattggatgaaccattgtctcctagcaattagtgccgtatactttaaagcaaaatggttgacgccattcgaaaaggaatttaccagtgattatcccttttacgtatctccgacggaaatggtagacgtaagtatgatgtctatgtacggcaaggcatttaatcacgcatctgtaaaagaatcattcggcaacttttcaatcatagaactgccatatgttggagatactagtatgatggtcattcttccagacaagattgatggattagaatccatagaacaaaatctaacagatacaaattttaagaaatggtgtgactttatggatgctatgtttatagatgttcacattcccaagtttaaggtaacaggctcgtataatctggtggatactctagtaaagtcaggactgacagaggtgttcggttcaactggagattatagcaatatgtgtaatttagatgtgagtgtcgacgctatgatccacaaaacgtatatagatgtcaatgaagagtatacagaagcagctgcagcaacttctgtactagtggcagactgtgcatcaacaattacaaatgagttctgtgcagatcatccgttcatctatgtgattaggcatgttgatggaaaaattcttttcgttggtagatattgctctccgacaactaattgttaaccattttttttaaaaaaaatagaaaaaacatgtggtattagtgcaggtcgttgttcttccaattgcaattggtaagatgacggccaactttagtacccacgtcttttcaccacagcactgtggatgtgacagactgaccagtattgatgacgtcaaacaatgtttgactgaatatatttattggtcgtcctatgcataccgcaacaggcaatgcgctggacaattgtattccacactcctctcttttagagatgatgcggaattagtgttcatcgacattcgcgagctggtaaaaaatatgccgtgggatgatgtcaaagattgtacagaaatcatccgttgttatataccggatgagcaaaaaaccatcagagagatttcggccatcatcggactttgtgcatatgctgctacttactggggaggtgaagaccatcccactagtaacagtctgaacgcattgtttgtgatgcttgagatgctaaattacgtggattataacatcatattccggcgtatgaattgatgagttgtacatcttgacattttctttcttctcttctccctttcttctcttctcccttcctccctcttctccctttcccagaaacaaacttttttacccactataaaataaaatgagtatactacctattatatttcttcctatatttttttattcttcattcgttcagacttttaacgcgtctgaatgtatcgacaaagggcaatattttgcatcattcatggagttagaaaacgagccagtaatcttaccatgtcctcaaataaatacgctatcatccggatataatatattagatattttatgggaaaaacgaggagcggataatgatagaattataccgatagataatggtagcaatatgctaattctgaacccgacacaatcagactctggtatttatatatgcattaccacgaacgaaacctactgtgacatgatgtcgttaaatttgacaatcgtgtctgtctcagaatcaaatatagatcttatctcgtatccacaaatagtaaatgagagatctactggcgaaatggtatgtcccaatattaatgcatttattgctagtaacgtaaacgcagatattatatggagcggacatcgacgccttagaaataagagacttaaacaacggacacctggaattattaccatagaagatgttagaaaaaatgatgctggttattatacatgtgttttagaatatatatacggtggcaaaacatataacgtaaccagaattgtaaaattagaggtacgggatagaataataccttctactatgcaattaccagatggcattgtaacttcaataggtagtaatttgactattgcatgcagagtatcgttgagacctcccacaacggacaccgacgtcttttggataagtaatggtatgtattacgaagaagatgatggggacggaaacggtagaataagtgtagcaaataaaatctatatgaccgataagagacgtgttattacatcccggttaaacattaatcctgtcaaggaagaagatgctacaacgtttacgtgtatggcgtttactattcctagcatcagcaaaacagttactgttagtataacgtgaatgtatgttgttacatttccatgtcaattgagtttataagaatttttatacattatcttccaacaaacaattgacgaacgtattgctatgattaactcccacgatactatgcatattattaatcattaacttgcagactatacctagtgctattttgacatactcgtgttcttgtgtaattgcggtatctatattattaaagtacgtaaatctagctatagttttattatttaattttagataatataccgtctccttatttttaaaaattgccacatcctttattaaatcatgaatgggaatttctatgtcatcgttagtatattgtgaacaacaagagcagatatctataggaaagggtggaatgcgatacattgatctatgtagttttaaaacacacgcgaactttgaagaatttatataaatcattccatcgatacatccttctatgttgacatgtatatatccaggaattcttttattaatgtcaggaaatgtataaactaaaacattgcccgaaagcggtgcctctatctgcgttatatccgttcttaacttacaaaatgtaaccaatacctttgcatgacttgttttgttcggcaacgttagtttaaacttgacgaatggattaattacaatagcatgatccgcgcatctattaagtttttttactttaacgcccttgtatgtttttacagagactttatctaaatttctagtgcttgtatgtgttataaatataacgggatatagaaccgaatcacctaccttagatacccaattacattttatcagatccagataataaacaaattttgtcgccctaactaattctatattgttatatattttacaattggttatgatatcatgtaataacttggagtctaacgcgcatcgtcgtacgtttatacaattgtgatttagtgtagtatatctacacatgtatttttccgcactatagtattctggactagtgataaaactatcgttatatctgtcttcaatgaactcatcgagatattgctctctgtcatattcatacacctgcataaactttctagacatcttacaatccgtgttattttaggatcatatttacatatttacgggtatatcaaagatgttagattagttaatgggaatcgtctataataatgaatattaaacaattatatgaggacttttaccacaaagcatcataaaaatgagtcgtcgtctgatttatgttttaaatatcaaccgcaaatcaactcataaaatacaagagaatgaaatatatacatattttagtcattgcaatatagaccatacttctacagaacttgattttgtagttaaaaactatgatctaaacagacgacaacctgtaactgggtatactgcactacactgctatttgtataataattactttacaaacgatgtactgaagatattattaaatcatgacgtaaatgtaacgatgaaaaccagtagcggacgtatgcctgtttatatattgcttactagatgttgtaatatttcacatgatgtagtgatagatatgatagacaaagataaaaaccacttattacatagagactattccaacctattactagagtatataaaatctcgttacatgttattgaaggaagaggatatcgatgagaacatagtatccactttattagataagggaatcgatcctaactttaaacaagacggatatacagcgttacattattattatttgtgtctcgcacacgtttataaactaggtgagtgtagaaaaccgataacgataaaaaaggccaagcgaattatttctttgtttatacaacatggagctaatctaaacgcgttagataattgtggtaatacaccattccatttgtatcttagtattgaaatgtgtaataatattcatatgactaaaatgctgttgacttttaatccgaatttcaaaatatgtaataatcatggattaacgcctatactatgttatataacttccgactacatacaacacgatattcttgttatgttaatacatcactatgaaacaaatgttggagaaatgccgatagatgagcgtcgtatgatcgtattcgagtttatcaaaacatattctacacgtccggcagattcgataacttatttgatgaataggtttaaaaatataaatatttatacccgctatgaaggaaagacattattacacgtagcatgtgaatataataatacacaagtaatagattatcttatacgtatcaacggagatataaatgcgttaaccgacaataacaaacacgctacacaactcattatagataacaaagaaaattccccatataccattaattgtttactgtatatacttagatatattgtagataagaatgtgataagatcgttggtggatcaacttccatctctacctatcttcgatataaaatcatttgagaaattcatatcctactgtatacttttagatgacacattttacgataggcacgttaagaatcgcgattctaaaacgtatcgatacgcattttcaaaatacatgtcgtttgataaatacgatggtataataactaaatgtcacgacgaaacaatgttactcaaactgtccactgttctagacactacactatatgcagttttaagatgtcataattcgagaaagttaagaagatacctcaacgagttaaaaaaatataataacgataagtcctttaaaatatattctaatattatgaatgagagataccttaatgtatattataaagatatgtacgtgtcaaaggtatatgataaactatttcctgttttcacagataaaaattgtctactaacattactaccttcagaaattatatacgaaatattatacatgctgacaattaacgatctttataatatatcgtatccacctaccaaagtatagttgtatttttctcatgcgatgtgtgtaaaaaaactgatattatataaatattttagtgccgtataataaagatgacgatgaaaatgatggtacatatatatttcgtatcattattgttattgctattccacagttacgccatagacatcgaaaatgaaatcacagaattcttcaataaaatgagagatactctaccagctaaagactctaaatggttgaatccagcatgtatgttcggaggcacaatgaatgatatagccgctctaggagagccattcagcgcaaagtgtcctcctattgaagacagtcttttatcgcacagatataaagactatgtggttaaatgggagaggctagaaaagaatagacggcgacaggtttctaataaacgtgttaaacatggtgatttatggatagccaactatacatctaaattcagtaaccgtaggtatttgtgcaccgtaactacaaagaatggtgactgtgttcagggtatagttagatctcatattaaaaaacctccttcatgcattccaaaaacatatgaactaggtactcatgataagtatggcatagacttatactgtggaattctttacgcaaaacattataataatataacttggtataaagataataaggaaattaatatcgacgacattaagtattcacaaacgggaaaggaattaattattcataatccagagttagaagatagcggaagatacgactgttacgttcattacgacgacgttagaatcaagaatgatatcgtagtatcaagatgtaaaatacttacggttataccgtcacaagaccacaggtttaaactaatactagatccgaaaatcaacgtaacgataggagaacctgccaatataacatgcactgctgtgtcaacgtcattattgatcgacgatgtactgattgaatgggaaaatccatccggatggcttataggattcgattttgatgtatactctgttttaactagtagaggcggtatcaccgaggcgaccttgtactttgaaaatgttactgaagaatatataggtaatacatataaatgtcgtggacacaactattattttgaaaaaacccttacaactacagtagtattggagtaaatatacaatgcatttttatatacattactgaattattattactgaattattattactgaattattattaattatatcgtatttgtgctatagaatggatgaagatacgcgactatctaggtatttgtatctcaccgatagagaacatataaatgtagactctattaaacagttgtgtaaaatatcagatcctaatgcatgttatagatgtggatgtacggctttacatgagtacttttataattatagatcagtcaacggaaaatacaagtatagatacaacggttactatcaatattattcatctagcgattatgaaaattataatgaatattattatgatagaactggtatgaacagtgagagtgataatatatcaatcaaaacagaatatgaattctatgatgaaacacaagatcaaagtacacaactagtaggttacgacattaaactcaaaaccaatgaggatgattttatggctatgatagatcagtgggtgtccatgattatatagatgaatcaattaataaagtagtatatggaagagagtctcacgtaagatggcgggatatatggcaagaacataatgatggcgtatacagtataggaaaggagtgcatagataatatatacgaagacaaccataccgtagacgaattctacaagatagacagcgtatcagatgtagatgacgcggaacacatatctccgataactaaaaaaccatagaatcagttgatgataatacctacatttctaatcttccgtataccatcaaatacaaaatattcgagcaacaataagtattttttatacctttaaaactgataaataaattttttctagtgatattttggcaagatgagaatcctatttctcatcgctttcatgtatgggtgtgttcactcatatgttaacgcggttgaaaccaaatgtccaaatctagacattgtaacatcttctggagaatttcattgttcaggatgtgtggaacatatgcctgagtttagctatatgtattggttggcaaaggatatgaaatcggacgaggataccaagtttatagaacatctgggtgatggcatcaaagaagatgaaaccgttcgtaccacagatagtggaatcgtcactctacgtaaagtccttcatgtgactgatactaataaatttgataattataggttcacttgtgtcctcgctacgctagatggcatttataaaaagaatgtttgctgaagtagttgtgtgctactatttttatttatgatataatctaatggaattaatttgaattgatatttatccaatactaaagattatattagaatcaaattaatcttttatacgagaaaaaataacgacatacgtcgtcaacaaattaaactttttatttattagttaactagcttatagaacttgctcattgttatgtttctaaaacgggtacggcatataggacaattatccgacgcaccggtttctcttcgtgttctatgccatatattgatgcatgttatgcaaaatatatgagtacacgaatccaataaaccaaagtatctatcgttttgagtaaacaacttcatagcaaattccacattctttttctttacttactctatacacgtcctcgtatttatttagtattttgatgatatccaactcagaaatggttgttgtattattgggtgtatttggagtataggtattattagctatgtaccaatttaccaaccctcttaatattgattgataatcacatcggttatccaattaataactaaattgtagtgtatatatagaccatatatgtttctatttttttgacagttacgtatagtttcagtaagttttgattgttgtattcctgtatctctagataagttagtcatatagtcccttccggcgatacgttttttccaagcccgaaattgattagccaaatgtgtatttatttttgtgatattgatataatatttcggataatgcatactgttagtcttatatcatttggttcatctatgtattgtaatattgttacatgatctatagatgatgtattgattttggcaggatcgaattccatatccgcgactaaacagtgaaaaaaatgtaaatactttttaaattttaaattagtaaaacttttttttattttttatgattccaaaaatactgaatacaaagtcctaaattataaatatggagatcatactaccacaacttattattatgtatacaaggccggtgtaatagatagatatatataattctattacaccggcagacaattaccgaccggtatttgtcgttaccaacataccgtataatatgtaatatacaattccataacccattgacagttgttatacatcaaaattgcaattcttttgattacgatgttataagaatgtagttaattgatgtatgatgttaatgtgtcctctttcctcttataacatcgtaatcaaaaacttttttataatatatacctaataatgtgtcttaatagttctcgtgattcgtcaaacaatcattcttataaaatataataaagcaacgtaaaaacacataaaaataagcgtaactaataagacaatggatatttacgacgataaaggtctacagactattaaactgtttaataatgaatttgattgtataaggaatgacatcagagaattatttaaacatgtaactgattccgatagtatacaacttccgatggaagacaattctgatattatagaaaatatcagaaaaatactatatagacgattaaaaaatgtagaatgtgttgacatcgataacacaataacttttatgaaatacgatccaaatgatgataataagcgtacgtgttctaattgggtacccttaactaataactatatggaatattgtctagtaatatatttggaaacaccgatatgtggaggcaaaataaaattataccaccctacaggaaatataaagtcggataaggatattatgtttgcaaagactctagactttaaatcaacgaaagtgttaactggacgtaaaacaattgccgttctagacatatccgtttcatataatagatcaatgactactattcactacaacgacgacgttgatatagatatacatactgataaaaatggaaaagagttatgttattgttatataacaatagatgatcattacttggttgatgtggaaactataggagttatagtcaatagatctggaaaatgtctgttagtaaataaccatctaggtataggtatcgttaaagataaacgtataagcgatagttttggagatgtatgtatggatacaatatttgacttttctgaagcacgagagttattttcattaactaatgatgataacaggaatatagcatgggacactgataaactagacgatgatacagatatatggactcccgtcacagaagatgattacaaatttctttctagactagtattgtatgcaaaatctcaatcggatactgtatttgactattatgttcttactggtgatacggaaccacccactgtattcattttcaaggtaactagattttactttaatatgccgaaataaaaaatttttgtataatatctagaggtagaggtattgtttagataaatacaaataacatagatacatcgcatacttagcatttttataaatatacataagacatacactttatacatttttgtaaaaatactcataaaaaaatttataaaaattatggcacaaccatatcttgtataggtagtttagttcgtcgagtgaacctataaacagataatagacaacacataataatgcctactaatacaagcataataccgggagatgggatatatgacgttgtagtgtttgggttttctgaacgttgatagtctactaatactacatgctgacatctaatgcctgtataaccatgagagcatctacaatacataccgtcaatatctctagcgtggatacagtcaccgtgtaaacaatatccatctccctctggaccgcataatctgatagctggaatatctgttgtagcgtttgtaatttctggcaatgtcgtttcgatagcgttaccactatcggcgaatgatctgattatcatagcagcgaacaacaacatcagataatttatcaacatttttgatggattctgtgtttatgctgtttctcagtgtgtgtttatgacaagattgggaattttatattattaattcagtaatataaactaataatatattgttaattgtgtaaataatataaaaataacaatacaatattgaatgtgttgctgttaaaaatgtatgtgttaatataatagaataaaataaatgagtatgatcattttagataacgattgattttatcattaccgcttcattcttatattctttgcttacggaacctatatttagaaacatctactaacaattttttatgcttgcattattaatggtatgtaatatgattgattgtgtacgcaataccaatttgttaagtatgaatacggggtacaaacataaattgaaatttaacattatttatttatgatatatatcgttatcgttaggtctataccatggatatctttaaagaactaatcttaaaacaccctgatgaaaatgttttgatttctccagtttccattttatctactttatctattctaaatcatggagcagctggttctacagctgaacaactatcaaaatatatagagaatatgaatgagaatacacccgatgacaataatgatgacatggaggtagatattccgtattgtgcgacactagctaccgcaaataaaatatacggtagcgatagtatcgagttccacgcctccttcctacaaaaaataaaagacgattttcaaactgtaaactttaataatgctaaccaaacaaaggaactaatcaacgaatgggttaagacaatgacaaatggtaaaattaattccttattgactagtccgctatccattaatactcgtatgacagttgttagcgccgtccattttaaagcaatgtggaaatatccattttctaaacatcttacatatacagacaagttttatatttctaagaatatagttaccagcgttgatatgatggtgggtaccgagaataacttgcaatatgtacatattaatgaattattcggaggattctctattatcgatattccatacgagggaaactctagtatggtaattatactaccggacgacatagaaggtatatataacatagaaaaaaatataacagatgaaaaatttaaaaaatggtgtggtatgttatctactaaaagtatagacttgtatatgccaaagtttaaagtggaaatgacagaaccgtataatctggtaccgattttagaaaatttaggacttactaatatattcggatattatgcagattttagcaagatgtgtaatgaaactatcactgtagaaaaatttctacatacgacgtttatagatgttaatgaggagtatacagaagcatcggccgttacaggagtatttacgattaacttttcgatggtatatcgtacgaaggtctacataaaccatccattcatgtacatgattaaagacaccacaggacgtatactttttatagggaaatactgctatccgcaataaatataaacaaatagacttttataaagagtcttcaacgataagtatatcgacatactacttatgctgcgaaagattctgaacgagaacgactatctcaccctcttggatcatatccgcactgctaaatactaaatctccactacactttttatcatcttatgaggaatgattgccttcgtgaaataggaataattagcaccagaatagctatggattattgtggtagagagtgcactattctatgtcgtctactggatgaagatgtgacgtacaaaaaaataaaactagaaattgaaacgtgtcacaacttatcaaaacatatagatagacgaggaaacaatgcgctacattgttacgtctccaataaatgcgatacagacattaagattgttctctcgcggagtcgagagactttgtagaaacaacgaaggattaactccgctaggagtatacagtaagcatagatacgtaaaatctcagattgtgcatctactgatatccagctattcaaattcctctaacgaactcaagtcgaatataaatgatttcgatctgtattcggataatatcgacttacgtctgctaaaatacctaattgtggataaacggatacgtccgtccaagaatacgaattatgcaatcaatggtctcggattggtggatatatacgtaacgacgcctaatccgagaccagaagtattgctatggcttcttaaatcagaatgttacagcaccggttacgtatttcgtacctgtatgtacgacagtgatatgtgtaagaactctcttcattactatatatcgtctcatagagaatctcaatctctatccaaggatgtaattaaatgtttgatcgataacaatgtttccatccatggcagagacgaaggaggatctttacccatccaatactactggtctttctcaaccatagatatagagattgttaaattattattaataaaggatgtggacacgtgtagagtatacgacgtcagccctatattagaggcgtattatctaaacaagcgatttagagtaaccccatataatgtagacatggaaatcgttaatcttcttattgagagacgtcatactcttgtcgacgtaatgcgtagtattacttcgtacgattccagagaatataaccactacatcatcgataacattctaaagagatttagacaacaggatgaatccatcgtacaagccatactgataaactacttacattacggcgatatggtcgttcgatgcatgttagataacggacaacaactatcctctacacgactactttgttaataataatctcgtcgatgtaaacgtcgtaaggtttatcgtggaaaatatggacacgcggctgtaaatcacgtatcgaacaatggccgtctatgtatgtacggtctgatattatcgagatttaataattgcgggtatcactgttatgaaaccatactgatagatgtatttgatatactaagcaagtacatggatgatatagatatgatcgataactctactatattacgcggtcgatgtcaataatatacaatttgcaaagcggttattggaatatggagcgagtatcacgctcgataatcaatacggccatccagaaaagcagttacagaagagaaaacaaaacgaaatcgttgttctacaagatgtctctccctacgacgattactacgtaaaaaagatactagcctactgcctattaagggacgagtcattcgcggaactacatagtaaattctgtttaaacgaggactataaaagtgtatttatgaaaaatatatcattcgataagatagattccatcatcgtgacataagtcgcctcaaagagattcgaatctccgacaccgacctgtatacggtatcacagctatcttaaagccatacattcagacagtcacatttcatttcccatgtacgacgatctcatagaacagtgccatctatcgatggagcgtaaaagtaaactcgtcgacaaagcactcaataaattagagtctaccatcggtcaatctagactatcgtatttgcctccggaaattatgcgcaatatcatctaaacagtatgttgtacggaaagaaccattacaaatattatccatgatagaaagaaaatatctatatgattggagaagtaggaaacaggaacaagacaacgattactacattattaaatcatgaagtccgtattatactcgtatatattgtttctctcatgtataataataaacggaagagatatagcaccgcatgcaccatccgatggaaagtgtaaagacaacgaatacaaacgccataatttgtgtccgggaacatacgcttccagattatgcgatagcaagactaacacacgatgtacgccgtgtggttcgggtaccttcacatctcgcaataatcatttacccgcttgtctaagttgtaacggaagacgcgatcgtgtaacacgactcacaatagaatctgtgaatgctctcccggatattattgtcttctcaaaggatcatccggatgcaaggcatgtgtttcccaaacaaaatgtggaataggatacggagtatccggagacgtcatctgttctccgtgtggtctcggaacatattctcacaccgtctcttccgcagataaatgcgaacccgtacccagaaatacgtttaactatatcgatgtggaaattaacctgtatccagttaacgacacgtcgtgtactcggacgaccactaccggtctcagcgaatccatctcaacgtcggaactaactattactatgaatcataaagactgtaatcccgtatttcgtgatggatacttctccgttcttaataaggtagcgacttcaggtttctttacaggagaaaggtgtgcactctgaatttcgagattaaatgcaataacaaagattcttcctccaaacagttaacgaaagcaaagaatgatactatcatgccgcattcggagacagtaactctagtgggcgacatctatatactatatagtaataccaatactcaagactacgaaactgatacaatctcttatcatgtgggtaatgttctcgatgtcgatagccatatgcccggtagttgcgatatacataaactgatcactaattccaaacccacccactttttatagtaagtttttcacccataaataataaatacaataattaatttctcgtaaaagtagaaaatatattctaatttattgcacggtaaggaagtagaatcataaagaacagtactcaatcaatagcaattatgaaacaatatatcgtcctggcatgcatgtgcctggcggcagctgctatgcctgccagtcttcagcaatcatcctcatcctcctcctcgtgtacggaagaagaaaacaaacatcatatgggaatcgatgttattatcaaagtcacaaagcaagaccaaacaccgaccaatgataagatttgccaatccgtaacggaaattacagagtccgagtcagatccagatcccgaggtggaatcagaagatgattccacatcagtcgaggatgtagatcctcctaccacttattactccatcatcggtggaggtctgagaatgaactttggattcaccaaatgtcctcagattaaatccatctcagaatccgctgatggaaacacagtgaatgctagattgtccagcgtgtccccaggacaaggtaaggactctcccgcgatcactcatgaagaagctcttgctatgatcaaagactgtgaagtgtctatcgacatcagatgtagcgaagaagagaaagacagcgacatcaagacccatccagtactcgggtctaacatctctcataagaaagtgagttacgaagatatcatcggttcaacgatcgtcgatacaaaatgcgtcaagaatctagagtttagcgttcgtatcggagacatgtgcaaggaatcatctgaacttgaggtcaaggatggattcaagtatgtcgacggatcggcatctgaaggtgcaaccgatgatacttcactcatcgattcaacaaaactcaaagcgtgtgtctgaatcgataactctattcatctgaaattggatgagtagggttaatcgaacgattcaggcacaccacgaattaaaaaagtgtaccggacactatattccggtttgcaaaacaaaaatgttcttaactacattcacaaaaagttacctctcgcgacttcttctttttctgtctcaatagtgtgatacgattatgacactattcctattcctattcctatttcctttcagagtatcacaaaaatattaaacctctttctgatggtctcataaaaaaagttttacaaaaatatttttattctctttctctctttgatggtctcataaaaaaagttttacaaaaatatttttattctctttctctctttgatggtctcataaaaaaagttttacaaaaatatttttattctctttctctctttgatggtctcataaaaaaagttttacaaaaatatttttattctctttctctctttgatggtctcataaaaaaagttttacaaaaatatttttattctctttctctctttgatggtctcataaaaaaagttttacaaaaatatttttattctctttctctctttgatggtctcataaaaaaagttttacaaaaatatttttattctctttctctctttgatggtctcataaaaaaagttttacaaaaatatttttattctctttctctctttgatggtctcataaaaaaagttttacaaaaatatttttattctctttctctctttgatggtctcataaaaaaagttttacaaaaatatttttattctctttctctctttgatggtctcataaaaaaagttttacaaaaatatttttattctctttctctctttgatggtctcataaaaaaagttttacaaaaatatttttattctctttctctctttgatggtctcataaaaaagttttacaaaaatatttttattctctttctctctttgatggtctcataaaaaagttttacaaaaatatttttattctctttctctctttgatggtctcataaaaaaagttttacaaaaatatttttattctctttctctctttgatggtctcataa

SEQ ID NO: 213 - DNA, 196307 bp, Artificial Sequence
  GLV-1h459
ttatgagaccatcaaagagagaaagagaataaaaatatttttgtaaaactttttttatgagaccatcaaagagagaaagagaataaaaatatttttgtaaaacttttttatgagaccatcaaagagagaaagagaataaaaatatttttgtaaaacttttttatgagaccatcaaagagagaaagagaataaaaatatttttgtaaaactttttttatgagaccatcaaagagagaaagagaataaaaatatttttgtaaaactttttttatgagaccatcaaagagagaaagagaataaaaatatttttgtaaaactttttttatgagaccatcaaagagagaaagagaataaaaatatttttgtaaaactttttttatgagaccatcaaagagagaaagagaataaaaatatttttgtaaaactttttttatgagaccatcaaagagagaaagagaataaaaatatttttgtaaaactttttttatgagaccatcaaagagagaaagagaataaaaatatttttgtaaaactttttttatgagaccatcaaagagagaaagagaataaaaatatttttgtaaaactttttttatgagaccatcaaagagagaaagagaataaaaatatttttgtaaaactttttttatgagaccatcaaagagagaaagagaataaaaatatttttgtaaaactttttttatgagaccatcaaagagagaaagagaataaaaatatttttgtaaaactttttttatgagaccatcaaagagagaaagagaataaaaatatttttgtaaaactttttttatgagaccatcagaaagaggtttaatatttttgtgatactctgaaaggaaataggaataggaataggaatagtgtcataatcgtatcacactattgagacagaaaaagaagaagtcgcgagaggtaactttttgtgaatgtagttaagaacatttttgttttgcaaaccggaatatagtgtccggtacacttttttaattcgtggtgtgcctgaatcgttcgattaaccctactcatccaatttcagatgaatagagttatcgattcagacacacgctttgagttttgttgaatcgatgagtgaagtatcatcggttgcaccttcagatgccgatccgtcgacatacttgaatccatccttgacctcaagttcagatgattccttgcacatgtctccgatacgaacgctaaactctagattcttgacgcattttgtatcgacgatcgttgaaccgatgatatcttcgtaactcactttcttatgagagatgttagacccgagtactggatgggtcttgatgtcgctgtctttctcttcttcgctacatctgatgtcgatagacacttcacagtctttgatcatagcaagagcttcttcatgagtgatcgcgggagagtccttaccttgtcctggggacacgctggacaatctagcattcactgtgtttccatcagcggattctgagatggatttaatctgaggacatttggtgaatccaaagttcattctcagacctccaccgatgatggagtaataagtggtaggaggatctacatcctcgactgatgtggaatcatcttctgattccacctcgggatctggatctgactcggactctgtaatttccgttacggattggcaaatcttatcattggtcggtgtttggtcttgctttgtgactttgataataacatcgattcccatatgatgtttgttttcttcttccgtacacgaggaggaggatgaggatgattgctgaagactggcaggcatagcagctgccgccaggcacatgcatgccaggacgatatattgtttcataattgctattgattgagtactgttctttatgattctacttccttaccgtgcaataaattagaatatattttctacttttacgagaaattaattattgtatttattatttatgggtgaaaaacttactataaaaagtgggtgggtttggaattagtgatcagtttatgtatatcgcaactaccgggcatatggctatcgacatcgagaacattacccacatgataagagattgtatcagtttcgtagtcttgagtattggtattactatatagtatatagatgtcgcccactagagttactgtctccgaatgcggcatgatagtatcattctttgctttcgttaactgtttggaggaagaatctttgttattgcatttaatctcgaaattcagagtgcacacctttctcctgtaaagaaacctgaagtcgctaccttattaagaacggagaagtatccatcacgaaatacgggattacagtctttatgattcatagtaatagttagttccgacgttgagatggattcgctgagaccggtagtggtcgtccgagtacacgacgtgtcgttaactggatacaggttaatttccacatcgatatagttaaacgtatttctgggtacgggttcgcatttatctgcggaagagacggtgtgagaatatgttccgagaccacacggagaacagatgacgtctccggatactccgtatcctattccacattttgtttgggaaacacatgccttgcatccggatgatcctttgagaagacaataatatccgggagagcattcacagattctattgtgagtcgtgttacacgatcgcgtcttccgttacaacttagacaagcgggtaaatgattattgcgagatgtgaaggtacccgaaccacacggcgtacatcgtgtgttagtcttgctatcgcataatctggaagcgtatgttcccggacacaaattatggcgtttgtattcgttgtctttacactttccatcggatggtgcatgcggtgctatatctcttccgtttattattatacatgagagaaacaatatatacgagtataatacggacttcatgatttaataatgtagtaatcgttgtcttgttcctgtttcctacttctccaatcatatagatattttctttctatcatggataatatttgtaatggttctttccgtacaacatactgtttagatgatattgcgcataatttccggaggcaaatacgatagtctagattgaccgatggtagactctaatttattgagtgctttgtcgacgagtttacttttacgctccatcgatagatggcactgttctatgagatcgtcgtacatgggaaatgaaatgtgactgtctgaatgtatggctttaagatagctgtgataccgtatacaggtcggtgtcggagattcgaatctctttgaggcgacttatgtcacgatgatggaatctatcttatcgaatgatatatttttcataaatacacttttatagtcctcgtttaaacagaatttactatgtagttccgcgaatgactcgtcccttaataggcagtaggctagtatcttttttacgtagtaatcgtcgtagggagagacatcttgtagaacaacgatttcgttttgttttctcttctgtaactgcttttctggatggccgtattgattatcgagcgtgatactcgctccatattccaataaccgctttgcaaattgtatattattgacatcgaccgcgtaatatagtagagttatcgatcatatctatatcatccatgtacttgcttagtatatcaaatacatctatcagtatggtttcataacagtgatacccgcaattattaaatctcgataatatcagaccgtacatacatagacggccattgttcgatacgtgatttacagccgcgtgtccatattttccacgataaaccttacgacgtttacatcgacgagattattattaacaaagtagtcgtgtagaggatagttgttgtccgttatctaacatgcatcgaacgaccatatcgccgtaatgtaagtagtttatcagtatggcttgtacgatggattcatcctgttgtctaaatctctttagaatgttatcgatgatgtagtggttatattctctggaatcgtacgaagtaatactacgcattacgtcgacaagagtatgacgtctctcaataagaagattaacgatttccatgtctacattatatggggttactctaaatcgcttgtttagataatacgcctctaatatagggctgacgtcgtatactctacacgtgtccacatcctttattaataataatttaacaatctctatatctatggttgagaaagaccagtagtattggatgggtaaagatcctccttcgtctctgccatggatggaaacattgttatcgatcaaacatttaattacatccttggatagagattgagattctctatgagacgatatatagtaatgaagagagttcttacacatatcactgtcgtacatacaggtacgaaatacgtaaccggtgctgtaacattctgatttaagaagccatagcaatacttctggtctcggattaggcgtcgttacgtatatatccaccaatccgagaccattgattgcataattcgtattcttggacggacgtatccgtttatccacaattaggtattttagcagacgtaagtcgatattatccgaatacagatcgaaatcatttatattcgacttgagttcgttagaggaatttgaatagctggatatcagtagatgcacaatctgagattttacgtatctatgcttactgtatactcctagcggagttaatccttcgttgtttctacaaagtctctcgactccgcgagagaacaatcttaatgtctgtatcgcatttattggagacgtaacaatgtagcgcattgtttcctcgtctatctatatgttttgataagttgtgacacgtttcaatttctagttttatttttttgtacgtcacatcttcatccagtagacgacatagaatagtgcactctctaccacaataatccatagctattctggtgctaattattcctatttcacgaaggcaatcattcctcataagatgataaaaagtgtagtggagatttagtatttagcagtgcggatatgatccaagagggtgagatagtcgttctcgttcagaatctttcgcagcataagtagtatgtcgatatacttatcgttgaagactctttataaaagtctatttgtttatatttattgcggatagcagtatttccctataaaaagtatacgtcctgtggtgtctttaatcatgtacatgaatggatggtttatgtagaccttcgtacgatataccatcgaaaagttaatcgtaaatactcctgtaacggccgatgcttctgtatactcctcattaacatctataaacgtcgtatgtagaaatttttctacagtgatagtttcattacacatcttgctaaaatctgcataatatccgaatatattagtaagtcctaaattttctaaaatcggtaccagattatacggttctgtcatttccactttaaactttggcatatacaagtctatacttttagtagataacataccacaccattttttaaatttttcatctgttatatttttttctatgttatatataccttctatgtcgtccggtagtataattaccatactagagtttccctcgtatggaatatcgataatagagaatcctccgaataattcattaatatgtacatattgcaagttattctcggtacccaccatcatatcaacgctggtaactatattcttagaaatataaaacttgtctgtatatgtaagatgtttagaaaatggatatttccacattgctttaaaatggacggcgctaacaactgtcatacgagtattaatggatagcggactagtcaataaggaattaattttaccatttgtcattgtcttaacccattcgttgattagttcctttgtttggttagcattattaaagtttacagtttgaaaatcgtcttttattttttgtaggaaggaggcgtggaactcgatactatcgctaccgtatattttatttgcggtagctagtgtcgcacaatacggaatatctacctccatgtcatcattattgtcatcgggtgtattctcattcatattctctatatattttgatagttgttcagctgtagaaccagctgctccatgatttagaatagataaagtagataaaatggaaactggagaaatcaaaacattttcatcagggtgttttaagattagttctttaaagatatccatggtatagacctaacgataacgatatatatcataaataaataatgttaaatttcaatttatgtttgtaccccgtattcatacttaacaaattggtattgcgtacacaatcaatcatattacataccattaataatgcaagcataaaaaattgttagtagatgtttctaaatataggttccgtaagcaaagaatataagaatgaagcggtaatgataaaatcaatcgttatctaaaatgatcatactcatttattttattctattatattaacacatacatttttaacagcaacacattcaatattgtattgttatttttatattatttacacaattaacaatatattattagtttatattactgaattaataatataaaattcccaatcttgtcataaacacacactgagaaacagcataaacacagaatccatcaaaaatgttgataaattatctgatgttgttgttcgctgctatgataatcagatcattcgccgatagtggtaacgctatcgaaacgacattgccagaaattacaaacgctacaacagatattccagctatcagattatgcggtccagagggagatggatattgtttacacggtgactgtatccacgctagagatattgacggtatgtattgtagatgctctcatggttatacaggcattagatgtcagcatgtagtattagtagactatcaacgttcagaaaacccaaacactacaacgtcatatatcccatctcccggtattatgcttgtattagtaggcattattatgtgttgtctattatctgtttataggttcactcgacgaactaaactacctatacaagatatggttgtgccataatttttataaatttttttatgagtatttttacaaaaatgtataaagtgtatgtcttatgtatatttataaaaatgctaagtatgcgatgtatctatgttatttgtatttatctaaacaatacctctacctctagatattatacaaaaattttttatttcggcatattaaagtaaaatctagttaccttgaaaatgaatacagtgggtggttccgtatcaccagtaagaacataatagtcaaatacagtatccgattgagattttgcatacaatactagtctagaaagaaatttgtaatcatcttctgtgacgggagtccatatatctgtatcatcgtctagtttatcagtgtcccatgctatattcctgttatcatcattagttaatgaaaataactctcgtgcttcagaaaagtcaaatattgtatccatacatacatctccaaaactatcgcttatacgtttatctttaacgatacctatacctagatggttatttactaacagacattttccagatctattgactataactcctatagtttccacatcaaccaagtaatgatcatctattgttatataacaataacataactcttttccatttttatcagtatgtatatctatatcaacgtcgtcgttgtagtgaatagtagtcattgatctattatatgaaacggatatgtctagaacggcaattgttttacgtccagttaacactttcgttgatttaaagtctagagtctttgcaaacataatatccttatccgactttatatttcctgtagggtggtataattttattttgcctccacatatcggtgtttccaaatatattactagacaatattccatatagttattagttaagggtacccaattagaacacgtacgcttattatcatcatttggatcgtatttcataaaagttattgtgttatcgatgtcaacacattctacattttttaatcgtctatatagtatttttctgatattttctataatatcagaattgtcttccatcggaagttgtatactatcggaatcagttacatgtttaaataattctctgatgtcattccttatacaatcaaattcattattaaacagtttaatagtctgtagacctttatcgtcgtaaatatccattgtcttattagttacgcttatttttatgtgtttttacgttgctttattatattttataagaatgattgtttgacgaatcacgagaactattaagacacattattaggtatatattataaaaaagtttttgattacgatgttataagaggaaagaggacacattaacatcatacatcaattaactacattcttataacatcgtaatcaaaagaattgcaattttgatgtataacaactgtcaatgggttatggaattgtatattacatattatacggtatgttggtaacgacaaataccggtcggtaattgtctgccggtgtaatagaattatatatatctatctattacaccggccttgtatacataataataagttgtggtagtatgatctccatatttataatttaggactttgtattcagtatttttggaatcataaaaaataaaaaaaagttttactaatttaaaatttaaaaagtatttacatttttttcactgtttagtcgcggatatggaattcgatcctgccaaaatcaatacatcatctatagatcatgtaacaatattacaatacatagatgaaccaaatgatataagactaacagtatgcattatccgaaatattatatcaatatcacaaaaataaatacacatttggctaatcaatttcgggcttggaaaaaacgtatcgccggaagggactatatgactaacttatctagagatacaggaatacaacaatcaaaacttactgaaactatacgtaactgtcaaaaaaatagaaacatatatggtctatatatacactacaatttagttattaattggataaccgatgtgattatcaatcaatattaagagggttggtaaattggtacatagctaataatacctatactccaaatacacccaataatacaacaaccatttctgagttggatatcatcaaaatactaaataaatacgaggacgtgtatagagtaagtaaagaaaaagaatgtggaatttgctatgaagttgtttactcaaaacgatagatactttggtttattggattcgtgtactcatatattttgcataacatgcatcaatatatggcatagaacacgaagagaaaccggtgcgtcggataattgtcctatatgccgtacccgttttagaaacataacaatgagcaagttctataagctagttaactaataaataaaaagtttaatttgttgacgacgtatgtcgttattttttctcgtataaaagattaatttgattctaatataatctttagtattggataaatatcaattcaaattaattccattagattatatcataaataaaaatagtagcacacaactacttcagcaaacattctttttataaatgccatctagcgtagcgaggacacaagtgaacctataattatcaaatttattagtatcagtcacatgaaggactttacgtagagtgacgattccactatctgtggtacgaacggtttcatcttctttgatgccatcacccagatgttctataaacttggtatcctcgtccgatttcatatcctttgccaaccaatacatatagctaaactcaggcatatgttccacacatcctgaacaatgaaattctccagaagatgttacaatgtctagatttggacatttggtttcaaccgcgttaacatatgagtgaacacacccatacatgaaagcgatgagaaataggattctcatcttgccaaaatatcactagaaaaaatttatttatcagttttaaaggtataaaaaatacttattgttgctcgaatattttgtatttgatggtatacggaagattagaaatgtaggtattatcatcaactgattctatggttttatgtattctatcatgtttcactattgcgttggaaataatatcatatgcttccacatatattttattttgttttaactcataatactcacgtaattctggattattggcatatctatgaataattttagctccatgatcagtaaatattaatgagaacatagtattaccacctaccattatttttttcatctcattcaattcttaattgcaaagatctatataatcattatagcgttgacttatggactctggaatcttagacgatgtacagtcatctataatcatggcatatttaatacattgttttatagcatagtcgttatctacgatgttagatatttctctcaatgaatcaatcacacaatctaatgtaggtttatgacataatagcattttcagcagttcaatgtttttagattcgttgatggcaatggctatacatgtatatccgttatttgatctaatgttgacatctgaaccggattctagcagtaaagatactagagattgtttattatatctaacagccttgtgaagaagtgtttctcctcgtttgtcaatcatgttaatgtctttaagataaggtaggcaaatgtttatagtactaagaattgggcaagcataagacatgtcacaaagacccttttttgtatgtataagtgtaaaaattataacatccatagttggatttacataggtgtccaatcgggatctctccatcatcgagataattgatggcatctcccttccttttttagtagatatttcatcgtgtaagaatcaatattaatatttctaaagtatccgtgtatagcctctttatttaccacagctccatattccactagagggatatcgccgaatgtcatatactcaattagtatatgttggaggacatccgagttcattgttttcaatatcaaagagatggtttccttatcatttctccatagtggtacaatactacacattattccgtgcggctttccattttccaaaaacaatttgaccaaatctaaatctacatctttattgtatctataatcactatttagataatcagccataattcctcgagtgcaacatgttagatcgtctatatatgaataagcagtgttatctattcctttcattaacaatttaacgatgtctatatctatatgagatgacttaatataatattgaagagctgtacaatagtttttatctataaaagacggcttgattccgtgattaattagacatttaacaacttccggacgcacatatgctctcgtatccgactctgaatacagatgagagatgatatacagatgcaatacggtaccgcaatttcgtagttgataatcatcatacgcgtatcagtactcgtcctcataaagaacactgcagccattttctatgaacaaatcaataattttagaaacaggatcattgtcattacataattttctataactgaacgatggttttcacatttaacactcaagtcaaatccatgttctaccaacacctttatcaagtcaacgtctacatttttggatttcatatagctgaatatattaaagttatttatgttgctaaatccagtggcttctagtagagccatcgctatatccttattaactttaacatgtctactatttgtgtattcttctaatggggtaagctgtctccaatttttgcgtaatggattagtgccactgtctagtagtagtttgacgacctcgacattattacaatgctcattaaaaaggtatgcgtgtaaagcattattcttgaattggttcctggtatcattaggatctctgtctttcaacatctgtttaagttcatcaagagccacctcctcattttccaaatagtcaaacattttgactgaatgagctactgtgaactctatacacccacacaactaatgtcattaaatatcatgtcaaaaacttgtacaattattaataaaaataatttagtgtttaaattttaccagttccagattttacacctccgttaatacctccattaaccccactggacgatcctcctccccacattccaccgccaccagatgtataagttttagatcctttattactaccatcatgtccatggataaagacactccacatgccgccactaccccctttagaagacatattaataagacttaaggacaagtttaacaataaaattaatcacgagtaccctactaccaacctacactattatatgattatagtttctatttttacagtaccttgactaaagtttctagtcacaagagcaatactaccaacctacactattatatgattatagtttctatttttataggaacgcgtacgagaaaatcaaatgtctaatttctaacggtagtgttgataaacgattgttatccgcggatacctcctctatcatgtcgtctattttcttactttgttctattaacttattagcattatatattatttgattataaaacttatattgcttattagcccaatctgtaaatatcggattattaacatatcgtttctttgtaggtttatttaacatgtacatcactgtaagcatgtccttaccatttattttaatttgacgcatatccgcaatttctttttcgcagtcggttataaattctatatatgatggatacatgctacatgtgtacttataatcgactaatatgaagtacttgatacatattttcagtaacgatttattattaccacctatgaataagtacctgtgatcgtctaggtaatcaactgttttcttaatacattcgatggttggtaatttactcagaataatttccaatatcttaatatataattctgctatttctgggatatatttatctgccagtataacacaaatagtaatacatgtaaacccatattttgttattatattaatgtctgcgccattatctattaaccattctactaggctgacactatgcgactcaatacaatgataaagtatactacatccatgtttatctattttgtttatatcatcaatatacggcttacaaagttttagtatcgataacacatccaactcacgcatagagaaggtagggaataatggcataatatttattaggttatcatcattgtcattatctacaactaagtttccattttttaaaatatactcgacaactttaggatctctattgccaaatttttgaaaatatttatttatatgcttaaatctatataatgtagctccttcatcaatcatacatttaataacattgatgtatactgtatgataagatacatattctaacaatagatcttgtatagaatctgtatatcttttaagaattgtggatattaggatattattacataaactattacacaattctaaaatataaaacgtatcacggtcgaataatagttgatcaactatataattatcgattttgtgatttttcttcctaaactgtttacgtaaatagttagatagaatattcattagttcatgaccactatagttactatcgaataacgcgtcaaatatttcccgtttaatatcgcatttgtcaagataataatagagtgtggtatgttcacgataagtataataacgcatctctttttcgtgtgaaattaaatagtttattacgtccaaagatgtagcataaccatcttgtgacctagtaataatataataatagagaactgttttacccattctatcatcataatcagtggtgtagtcgtaatcgtaatcgtctaattcatcatcccaattataatattcaccagcacgtctaatctgttctattttgatcttgtatccatactgtatgttgctacatgtaggtattcctttatccaataatagtttaaacacatctacattgggatttgatgttgtagcgtatttttctacaatattaataccatttttgatactatttatttctatacctttcgaaattagtaatttcaataagtctatattgatgttatcagaacatagatattcgaatatatcaaaatcattgatatttttatagtcgactgacgacaataacaaaatcacaacatcgtttttgatattattatttttcttggtaacgtatgcctttaatggagtttcaccatcatactcatataatggatttgcaccactttctatcaatgattgtgcactgctggcatcgatgttaaatgttttacaactatcatagagtatcttatcgttaaccatgattggttgttgatgctatcgcattttttggtttctttcatttcagttatgtatggatttagcacgtttgggaagcatgagctcatatgatttcagtactgtagtgtcagtactattagtttcaataagatcaatctctagatctatagaatcaaaacacgataggtcagaagataatgaatatctgtaggcttcttgttgtactgtaacttctggttttgttagatggttgcatcgtgctttaacgtcaatggtacaaattttatcctcgctttgtgtatcatattcgtccctactataaaattgtatattcagattatcatgcgatgtgtatacgctaacggtatcaataaacggagcacaccatttagtcataaccgtaatccaaaaatttttaaagtatatcttaacgaaagaagttgtgtcattgtctacggtgtatggtactagatcctcataagtgtatatatctagagtaatgtttaatttattaaatggttgataatatggatcctcgtgacaatttccgaagatggaaataagacataaacacgcaataaatctaattgcggacatggttactccttaaaaaaatacgaataatcaccttggctatttagtaagtgtcatttaacactatactcatattaatccatggactcataatctctatacgggattaacggatgttctatatacggggatgagtagttctcttctttaactttatactttttactaatcatatttagactgatgtatgggtaatagtgtttgaagagctcgttctcatcatcagaataaatcaatatctctgtttttttgttatacagatgtattacagcctcatatattacgtaatagaacgtgtcatctaccttattaactttcaccgcatagttgtttgcaaatacggttaatcctttgacctcgtcgatttccgaccaatctgggcgtataatgaatctaaactttaattgcttgtaatcattcgaaataatttttagtttgcatccgtagttatcccctttatgtaactgtaaatttctcaacgcgatatctccattaataatgatgtcgaattcgtgctgtatacccatactgaatggatgaacgaataccgacggcgttaatagtaatttactttttcatctttacatattgggtactagttttactatcataagtttataaattccacaagctactatggaataagccaaccatcttagtataccacacatgtcttaaagtttattaattaattacatgttgttttatatatatcgctacgaatttaaagagaaattagtttaggaagaaaaattatctatctacatcatcacgtctctgtattctacgatagagtgctactttaagatgcgacagatccgtgtcatcaaatatatactccattaaaatgattattccggcagcgaacttgatattggatatatcacaacctttgttaatatctacgacaatagacagcagtcccatggttccataaacagtgagtttatctttctttgaagagatattttgtagagatcttataaaactgtcgaatgacatcgcatttatatctttagctaaatcgtatatgttaccatcgtaatatctaaccgcgtctatcttaaacgtttccatcgctttaaagacgtttccgatagatggtctcatttcatcagtcatactgagccaacaaatataatcgtgtataacatctttgatagaatcagactctaaagaaaacgaatcggctttattatacgcattcatgataaacttaatgaaaaatgtttttcgttgtttaagttggatgaatagtatgtcttaataattgttattatttcattaattaatatttagtaacgagtacactctataaaaacgagaatgacataactaatcataactagttatcaaagtgtctaggacgcgtaattttcatatggtatagatcctgtaagcattgtctgtattctggagctattttctctatcgcattagtgagttcagaatatgttataaatttaaatcgaataacgaacataactttagtaaagtcgtctatattaactcttttattttctagccatcgtaataccatgtttaagatagtatattctctagttactacgatctcatcgttgtctagaatatcacatactgaatctacatccaattttagaaattggtctgtgttacatatctcttctatattattgttgatgtattgtcgtagaaaactattacgtagaccattttctttataaaacgaatatatagtactccaattatctttaccgatatatttgcacacataatccattctctcaatcactacatctttaagattttcgttgttaagatatttggctaaactatataattctattagatcatcaacagaatcagtatatatttttctagatccaaagacgaactctttggcgtcctctataatattcccagaaaagatattttcgtgttttagtttatcgagatctgatctgttcatatacgccatgattgtacggtacgttatgataaccgcataaaataaaaatccattttcatttttaaccaatactattcataattgagattgatgtaatactttgttactttgaacgtaaagacagtacacggatccgtatctccaacaagcacgtagtaatcaaatttggtgttgttaaacttcgcaatattcatcaatttagatagaaacttatactcatcatctgttttaggaatccatgtattattaccactttccaacttatcattatcccaggctatgtttcgtccatcatcgttgcgcagagtgaataattcttttgtattcggtagttcaaatatatgatccatgcatagatcggcaaagctattgtagatgtgatttttcctaaatctaatataaaactcgtttactagcaaacactttcctgatttatcgaccaagacacatatggtttctaaatctatcaagtggtggggatccatagttatgacgcagtaacatatattattacattcttgactgtcgctaatatctaaatatttattgttatcgtattggattctgcatatagatggcttgtatgtcaaagatatagaacacataaccaatttatagtcgcgctttacattctcgaatctaaagttaagagatttagaaaacattatatcctcggatgatgttatcactgtttctggagtaggatatattaaagtctttacagatttcgtccgattcaaataaatcactaaataatatcccacattatcatctgttagagtagtatcattaaatctattatattttatgaaagatatatcactgctcacctctatatttcgtacatttttaaactgtttgtataatatctctctgatacaatcagatatatctattgtgtcggtagacgataccgttacatttgaattaatggtgttccattttacaacttttaacaagttgaccaattcatttctaatagtatcaaactctccatgattaaatattttaatagtatccattttatatcactacggacacaaagtagctgacataaaccattgtataatttttatgttttatgtttattagcgtacacattttggaagttccggcttccatgtatttcctggagagcaagtagatgatgaggaaccagatagtttatatccgtacttgcacttaaagtctacattgtcgttgtatgagtatgatcttttaaacccgctagacaagtatccgtttgatattgtaggatgtggacatttaacaatctgacacgtgggtggatcggaccattctcctcctgaacacaggacactagagttaccaatcaacgaatatccactattgcaactataagttacaacgctcccatcggtataaaaatcctcgtatccgttatgtcttccgttggatatagatggaggggattggcatttaacagattcacaaataggtgcctcgggattccataccatagatccagtagatcctaattcacaatacgatttagattcaccgatcaactgatatccgctattacaagagtacgttatactagagccaaagtctactccaccaatatcaagttggccattatcgatatctcgaggcgatgggcatctccgtttaatacattgattaaagagtgtccatccagtacctgtacatttagcatatataggtcccattttttgctttctgtatccaggtagacatagatattctatagtgtctcctatgttgtaattagcattagcatcagtctccacactattcttaaatttcatattaatgggtcgtgacggaatagtacagcatgatagaacgcatcctattcccaacaatgtcaggaacgtcacgctctccaccttcatatttatttatccgtaaaaatgttatcctggacatcgtacaaataataaaaagcccatatatgttcgctattgtagaaattgtttttcacagttgctcaaaaacgatggcagtgacttatgagttacgttacactttggagtctcatctttagtaaacatatcataatattcgatattacgagttgacatatcgaacaaattccaagtatttgattttggataatattcgtattttgcatctgctataattaagatataatcaccgcaagaacacacgaacatctttcctacatggttaaagtacatgtacaattctatccatttgtcttccttaactatatatttgtatagataattacgagtctcgtgagtaattccagtaattacatagatgtcgccgtcgtactctacagcataaactatactatgatgtctaggcatgggagacttttttatccaacgatttttagtgaaacattccacatcgtttaatactacatatttctcatacgtggtataaactccacccattacatatatatcatcgtttacgaataccgacgcgcctgaatatctaggagtaattaagtttggaagtcttatccatttcgaagtgccgtgtttcaaatattctgccacacccgttgaaatagaaaattctaatcctcctattacatataactttccatcgttaacacaagtactaacttctgattttaacgacgacatattagtaaccgttttccattttttcgttttaagatctacccgcgatacggaataaacatgtctattgttaatcatgccgccaataatgtatagacaattatgtaaaacatttgcattatagaattgtctatctgtattaccgactatcgtccaatattctgttctaggagagtaatgggttattgtggatatataatcagagtttttaatgactactatattatgttttataccatttcgtgtcactggctttgtagatttggatatagttaatcccaacaatgatatagcattgcgcatagtattagtcataaacttgggatgtaaaatgttgatgatatctacatcgtttggatttttatgtatccactttaataatatcatagctgtaacatcctcatgatttacgttaacgtcttcgtgggataagatagttgtcagttcatcctttgataattttccaaattctggatcggatgtcaccgcagtaatattgttgattatttctgacatcgacgcattatatagttttttaattccatatcttttagaaaagttaaacatccttatacaatttgtgaaattaatattatgaatcatagtttttacacatagatctactacaggcggaacatcaattattatggcagcaactagtatcatttctacattgtttatggtgatgtttatcttcttccagcgcatatagtctaatagcgattcaaacgcgtgatagtttataccattcaatataatcgcttcatcctttagatggtgatcctgaatgcgtttaaaaaaattatacggagacgccgtaataatttccttattcacttgtataatttccccattgatagaaaatattacgctttccattcttaaagtactataagtaattatagtataatgtaaacgtttatatattcaatatttttataaaaatcattttgacattaattcctttttaaatttccgtctatcatctatagaaacgtattctatgaatttataaaatgcttttacgtgtcctatcgtaggcgatagaaccgctaaaaagcctatcgaatttctacaaaagaatctgttatatggtatagggagagtataaaacattaaatgtccgtacttattaaagtattcagtagccaatcctaactctttcgaatacttattaatggctcttgttctgtacgaatctatttttttgaacaacggacctagtggtatatcttgttctatgtatctaaaataatgtctgactagatccgttagtttaatatccgcagtcatcttgtctagaatggcaaatctaactgcgggtttaggctttagtttagtttctatatctacatctatgtctttatctaacaccaaaaatataatagctaatattttattacaatcatccggatattcttctacgatctcactaactaatgtttctttggttatactagtatagtcactatcggacaaataaagaaaatcagatgatcgatgaataatacatttaaattcatcatctgtaagatttttgagatgtctcattagaatattattagggttagtactcattatcattcggcagctattacttattttattatttttcaccatatagatcaatcattagatcatcaaaatatgtttcaatcatcctaaagagtatggtgaatgactcttcccatctaatttctgaacgttcaccaatgtctctagccactttggcactaatagcgatcattcgcttagcgtcttctatattattaactggttgatttaatctatctagcaatggaccgtcggacagcgtcattctcatgttcttaatcaatgtacatacatcgccgtcatctaccaattcatccaacaacataagctttttaaaatcatcattataataggtttgatcgttgtcatttctccaaagaatatatctaataagtagagtcctcatgcttagttaacaactattttttatgttaaatcaattagtacaccgctatgtttaatacttattcatattttagtttttaggattgagaatcaatacaaaaattaatgcatcattaattttagaaatacttagtttccacgtagtcaatgaaacatttgaactcatcgtacaggacgttctcgtacaggacgtaactataaaccggtttatatttgttcaagatagatacaaatccgataactttttttacgaattctacgggatccactttaaaagtgtcataccgggttctttttatttttttaaacagatcaatggtgtgatgttgattaggtcttttacgaatttgatatagaatagcgtttacatattctccataatggtcaatcgccatttgttcgtatgtcataaattctttaattatatgacactgtgtattatttagttcatccttgttcattgttaggaatctatccaaaatggcaattatactagaactataggtgcgttgtatacacatattgatgtgtctgtttatacaatccatgatatttggatccatgctactaccttcgggtaaaattgtagcatcatataccatttctagtactttaggttcattattatccattgcagaggacgtcatgatcgaatcataaaaaaatatattatttttatgttattttgttaaaaataatcatcgaatacttcgtaagatactccttcatgaacataatcagttacaaaacgtttatatgaagtaaagtatctacgatttttacaaaagtccggatgcataagtacaaagtacgcgataaacggaataataatagatttatctagtctatctttttctatagctttcatagttagatacatggtctcagaagtaggattatgtaacatcagcttcgataaaatgactgggttatttagtcttacacattcgctcatacatgtatgaccgttaactacagagtctacactaaaatgattgaacaatagatagtctaccattgtttcgtattcagatagtacagcgtagtacatggcatcttcacaaattatatcattgtctaatagatatttgacgcatcttatggatcccacttcaacagccatcttaaaatcatattgctttcctttatcattaataatttctagaacatcatctctatcataaaagatacaaatattaactgtttgatccgtaataacattgctagtcaatagcaatttgttaataagatgcgctgggctcaatgtcttaataagaagtgtaagaggactatctccgaatttgttttgtttattaacatccgttgatggaagtaaaagatctataatgtctacattcttgactgttttagagcatacaatatggagaggtgtatttccatcatgatctggttttgagggactaattcctagtttcatcatccatgagattgtagaagcttttggattgtctgacataagatgtctatgaatatgatttttgccaaatttatccactatcctggcttcgaatccgatggacattatttttttaaacactctttctgaaggatctgtacacgccaacaacggaccacatccttcttcatcaaccgagttgttaatcttggctccatactgtaccaataaatttattctctctatgacttcatcatctgttcccgagagataatatagaggtgttttatgctgtttatcacacgcgtttggatctgcgccgtgcgtcagcagcatcgcgactattctattattattaattttagaagctatatgcaatggataatttccatcatcatccgtctcatttggagagtatcctctatgaagaagttcttcgacaaatcgttcatctagtcctttaattccacaatacgcatgtagaatgtgataattatttccagaaggttcgatagcttgtagcatattcctaaatacatctaaatttttactattatatttggcataaagagatagataatactcggccgacataatgttgtccattgtagtataaaaattaatatttctatttctatttctgtatatttgcaacaatttactctctataacaaatatcataacttagtttttttatgtcaagaaggcactggtttagttcatctataaatgtcacgccataactaccacgcatgccatactcagaattatgataaagatatttatccttggggtgtaggtaatggggattaatctttgttggatcagtctctaagttaacacatgtcacacatgatccatttatagttatatcacacgatgatgatttatgaattgattccggaagatcgctatcgtattttgtggttccacaattcatttccatacatgttattgtcacactaatattatgatgaactttatctagccgctgagtggtaaacaacagaacagatagtttattatctttaccaacaccctcagccgctgccacaaatctctgatccgtatccatgatggtcatgtttatttctagtccgtatccagtcaacactatgttagcatttctgtcgatatagctttcactcatatgacactcaccaataatagtagaattaatgtcgtaatttacaccaatagtgagttcggcggcaaagtaccaataccggtaatcttgtcgaggaggacatatagtattcttgtattctaccgaatacccgagagatgcgatacaaaagagcaagactaatttgtaaaccatcttactcaaaatatgtaacaatagtacgatgcaatgagtaagacaataggaaatctatcttatatacacataattattctatcaattttaccaattagttagtgtaatgttaacaaaaatgtgggagaatctaattagtttttctttacacaattgacgtacatgagtctgagttccttgtttttgctaattatttcatccaatttattattcttgacgatatcgagatcttttgtataggagtcaaacttgtattcaacatgcttttctataatcattttagctatttcggcatcatccaatagtacattttccagattagcagaatagatattaatgtcgtatttgaacagagcctgtaacatctcaatgtctttattatctatagccaatttaatgtccggaatgaagagaagggaattattggtgtttgtcgacgtcatatagtcgagcaagagaatcatcatatccacgtgtccattttttatagtgatgtgaatacaactaaggagaatagccagatcaaaagtagatggtatctctgaaagaaagtaggaaacaatacttacatcattaagcatgacggcatgataaaatgaagttttccatccagttttcccatagaacatcagtctccaatttttcttaacaaacagttttaccgtttgcatgttaccactatcaaccgcataatacaatgcggtgtttcccttgtcatcaaattgtgaatcatccagtccactgaatagcaaaatctttactattttggtatcttccaatgtggctgcctgatgtaatggaaattcattctctagaagatttttcaatgctccagcgttcaacaacgtacatactagacgcacgttattatcagctattgcataatacaaggcactatgtccatggacatccgccttaaatgtatctttactagagagaaagcttttcagctgcttagacttccaagtattaattcgtgacagatccatgtctgaaacgagacgctaattagtgtatattttttcattttttataattttgtcatattgcaccagaattaataatatctttaatagatctgattagtagatacatggctatcgcaaaacaacatatacacatttaataaaaataatatttattaagaaaattcagatttcacgtacccatcaatataaataaaataatgattccttacaccgtacccatattaaggagattccaccttacccataaacaatataaatccagtaatatcatgtctgatgatgaacacaaatggtgtattaaattccagtttttcaggagatgatctcgccgtagctaccataatagtagatgcctctgctacagttccttgttcgtcgacatctatctttgcattctgaaacattttataaatatataatgggtccctagtcatatgtttaaacgacgcattatctggattaaacatactaggagccatcatttcggctatcgacttaatatccctcttattttcgatagaaaatttagggagtttaagattgtacactttattccctaattgagacgaccaatagtctaattttgcagccgtgatagaatctgtgaaatgggtcatattatcacctattgccaggtacatactaatattagcatccttatacggaaggcgtaccatgtcatattctttgtcatcgattgtgattgtatttccttgcaatttagtaactacgttcatcatgggaaccgttttcgtaccgtacttattagtaaaactagcattgcgtgttttagtgatatcaaacggatattgccatatacctttaaaatatatagtattaatgattgcccatagagtattattgtcgagcatattagaatctactacattagacataccggatctacgttctactatagaattaattttattaaccgcatctcgtctaaagtttaatctatataggccgaatctatgatattgttgataatacgacggtttaatgcacacagtattatctacgaaactttgataagttagatcagtgtacgtatatttagatgttttcagcttagctaatcctgatattaattctgtaaatgctggacccagatctctttttctcaaatccatagtcttcaataattctattctagtattacctgatgcaggcaatagcgacataaacatagaaaacgaataaccaaacggtgagaagacaatattatcatcttgaatatttttatacgctactataccggcattggtaaatccttgtagacgataggcggacgctgaacacgctaacgatagtatcaataacgcaatcatgattttatggtattaataattaaccttatttttatgttcggtataaaaaaattattgatgtctacacatccttttgtaattgacatctatatatccttttgtataatcaactctaatcactttaacttttacagttttccctaccagtttatccctatattcaacatatctatccatatgcatcttaacactctctgccaagatagcttcagagtgaggatagtcaaaaagataaatatatagagcataatcattctcgtatactctgccctttattacatcacccgcattgggcaacgaataacaaaatgcaagcatcttgttaacgggctcgtaaattgggataaaaattatgtttttattgtcttatatctattttattcaagagaatattcaggaatttctttttccggttgtatctcgtcgcagtatatatcatttgtacattgtttcatattttttaatagtttacaccttttagtaggactagtatcgtacaattcatagctgtattttgaattccaatcacgcataaaaatatcttccaattgttgacgaagacctaatccatcatccggtgtaatattaatagatgctccacatgtatccgtaaagtaatttcctgtccaatttgaggtacctatataggccgttttatcggttaccatatatttggcatggtttaccctagaatacggaatgggaggatcagcatctggtacaataaatagctttacttctatatttatgtttttagattttagcatagcgatagatcttaaaaagtttctcatgataaacgaagatcgttgccagcaactaatcaatagcttaacggatacttgtctgtctatagcggatcttcttaattcatcttctatataaggccaaaacaaaattttacccgccttcgaataaataatagggataaagttcataacagatacataaacgaatttactcgcatttctaatacatgacaataaagcggttaaatcattggttctttccatagtacatagttgttgcggtgcagaagcaataaatacagagtgtggaacgccgcttacgttaatactaagaggatgatctgtattataatacgacggataaaagtttttccaattatatggtagattgttaactccaagataccagtatacctcaaaaatttgagtgagatccgctgccaagttcctattattgaagatcgcaatacccaattccttgacctgagttagtgatctccaatccatgttagcgcttcctaaataaatatgtgtattatcagatatccaaaattttgtatgaagaactcctcctaggatatttgtaatatctatgtatcgtacttcaactccggccatttgtagtctttcaacatcctttaatggtttgttagatttattaacggctactctaactcgtactcctcttttgggtaattgtacaatctcgtttaatattatcgtgccgaaattcgtacccacttcatccgataaactccaataaaaagatgatatatctagtgtttttgtggtattggatagaatttccctccacatgttaaatgtagacaaatatactttatcaaattgcatacctataggaatagtttctgtaatcactgcgattgtattatccggattcattttatttgttaaaagaataatcctatatcacttcactctattaaaaatccaagtttctatttctttcatgactgattttttaacttcatccgtttccttatgaagatgatgtttggcaccttcataaatttttatttctctattacaatttgcatgttgcatgaaataatatgcacctaaaacatcgctaatcttattgtttgttccctggagtatgagagtcggggggtgttaatcttggaaattatttttctaaccttgttggtagccttcaagacctgactagcaaatccagccttaattttttcatgattgactaatgggtcgtattggtatttataaactttatccatatctctagatactgattctggacatagctttccgactggcgcatttggtgtgatggttcccataagtttggcagctagcagattcagtcttgaaacagcatctgcattaactagaggagacattagaatcattgctgtaaacaagtttggattatcgtaagaggctagctcccatggaatgacccaataagtagatttaatagttaccacgtgctgtaccaaagtcatcaatcatcattttttcaccattacttcttccatgtccaatatgatcatgtgagaatactaaaattcctaacgatgatatgttttcagctagttcgtcataacgtccagaatgtttaccagctccatgacttatgaatactaatgccttaggatatgtaataggtttccaatatttacaatatatgtaatcattgtccagattgaacatacagtttgcactcatgattcacgttatataactatcaatattaacagttcgtttgatgatcatattatttttatgttttattgataattgtaaaaacatacaattaaatcaatatagaggaaggagacggctactgtcttttgtaagatagtcatggcgactaaattagattatgaggatgctgttttttactttgtggatgatgataaaatatgtagtcgcgactccatcatcgatctaatagatgaatatattacgtggagaaatcatgttatagtgtttaacaaagatattaccagttgtggaagactgtacaaggaattgatgaagttcgatgatgtcgctatacggtactatggtattgataaaattaatgagattgtcgaagctatgagcgaaggagaccactacatcaattttacaaaagtccatgatcaggaaagtttattcgctaccataggaatatgtgctaaaatcactgaacattggggatacaaaaagatttcagaatctagattccaatcattgggaaacattacagatttgatgaccgacgataatataaacatcttgatactttttctagaaaaaaaattgaattgatgatataggggtcttcataacgcataattattacgttagcattctatatccgtgttaaaaaaaattatcctatcatgtatttgagagttttatatgtagcaaacatgatagctgtgatgccaataagctttagatattcacgcgtgctagtgttagggatggtattatctggtggtgaaatgtccgttatataatctacaaaacaatcatcgcatatagtatgcgatagtagagtaaacatttttatagtttttactggattcatacatcgtctacccaattcggttataaatgaaattgtcgccaatcttacacccaaccccttgttatccattagcatagtattaacttcgttatttatgtcataaactgtaaatgattttgtagatgccatatcatacatgatattcatgtccctattataatcattactaactttatcacaatatatgttgataatatctatatatgatctagtctttgtgggcaactgtctatacaagtcgtctaaacgttgtttactcatatagtatcgaacagccatcattacatggtcccgttccgttgatagataatcgagtatgttagtggacttgtcaaatctatataccatattttctggaagtggatatacatagtcgtgatcaacattattgctagcctcatcttctatatcctgtactataccattatctatatcatctacataatctatgatattattacacataaacatcgacaacatactattgtttattatctaagtcctgttgatccaaacccttgatctcctctatttgtactatctagagattgtacttcttccagttctggataatatatacgttgatagattagctgagctattctatctccagtatttacattaaacgtacattttccattattaataagaatgactcctatgtttcccctataatcttcgtctattacaccacctcctatatcaatgccttttagtgacagaccagacctaggagctattctaccatagcagaacttaggcatggacatactaatatctgtcttaattaactgtctttctcctggagggatagtataatcgtaagcgctatacaaatcatatccggcagcacccggcgattgcctagtaggagatttagctctgttagtttccttaacaaatctaactggtgagttaatattcatgttgaacataaaactaatattttatttcaaaattatttaccatcccatatattccatgaataagtgtgatgattgtacacttctatagtatctatatacgatccacgataaaatcctcctatcaatagcagtttattatccactatgatcaattctggattatccctcggataaataggatcatctatcagagtccatgtattgctggattcacaataaaattccgcatttctaccaaccaagaataaccttctaccgaacactaacgcgcatgatttataatgaggataataagtggatggtccaaactgccactgatcatgattgggtagcaaatattctgtagttgtatcagtttcagaatgtcctcccattacgtatataacattgtttatggatgccactgctggattacatctaggtttcagaagactcggcatattaacccaagcagcatccccgtggaaccaacgctcaacagatgtgggatttggtagacctcctactacgtataatttattgttagcgggtatcccgctagcatacagtctggggctattcatcggaggaattggaatccaattgtttgatatataatttacagctatagcattgttatgtatttcattgttcatccatccaccgatgagatatactacttctccaacatgagtacttgtacacatatggaatatatctataatttgatccatgttcataggatactctatgaatggatacttgtatgatttgcgtggttgtttatcacaatgaaatattttggtacagtctagtatccattttacattatttatacctctgggagaaagataatttgacctgattacatttttgataaggagtagcagatttcctaatttatttcttcgcctcatataccacttaatgacaaaatcaactacataatcctcatctggaacatttagttcatcgctttctagaataagtttcatagatagataatcaaaattgtctatgatgtcatcttccagttccaaaaagtgtttggcaataaagtttttagtatgacataagagattggatagtccgtattctatacccatcatgtaacactcgacacaatattcctttctaaaatctcgtaagataaagtttatacaagtgtagatgataaattctacagaggttaatatagaagcacgtaataaattgacgacgttatgactatctatatatacctttccagtatatgagtaaataactatagaagttaaactgtgaatgtcaaggtctagacaaacccttgtaactggatctttatttttcgtgtatttttgacgtaaatgtgtgcgaaagtaaggagataactttttcaatatcgtagaattgactattatattgcctcctatggcatcaataattgttttgaatttcttagtcatagacaatgctaatatattcttacagtacacagtattgacaaatatcggcatttatgtttctttaaaagtcaacatctagagaaaaatgattatctttttgagacataactcccattttttggtattcacccacacgtttttcgaaaaaattagtttttccttccaatgatatattttccatgaaatcaaacggattggtaacattataaatttttttaaatcccaattcagaaatcaatctatccgcgacgaattctatatatgttttcatcatttcacaattcattcctataagtttaactggaagagccgcagtaagaaattcttgttcaatggatactgcatctgttataatagatctaacggtttcttcactcggtggatgcaataaatgtttaaacatcaaacatgcgaaatcgcagtgcagaccctcgtctctactaattagttcgttggaaaacgtgagtccgggcattaggccacgctttttaagccaaaatatggaagcgaatgatccagaaaagaaaattccttctactgcagcaaaggcaataagtctctctccataaccggcgctgtcatgtatccacttttgagcccaatcggccttcttttttacacaaggcatcgtttctatggcattaaagagatagtttttttcattactatctttaacataagtatcgatcaaaagactatacatttccgaatgaatgttttcaatggccatctgaaatccgtagaaacatctagcctcggtaatctgtacttctgtacaaaatcgttccgccaaattttcattcactattccgtcactggctgcaaaaaacgccaatacatgttttataaaatatttttcgtctggtgttagtttattccaatcattgatatctttagatatatctacttcttccactgtccaaaatgatgcctctgcctttttatacatgttccagatgtcatgatattggattgggaaaataacaaatctatttggatttggtgcaaggatgggttccataactaaattaacaataacaataaattttttttcagttatctatatgcctgtacttggattttttgtacatcgatatcgccgcaatcactacaataattacaagtattattgatagcattgttattagtactatcataattaaattatctacattcatgggtgctgaataatcgttattatcatcattatcattttgtaattgtgacatcatactagataaatcgtttgcgagattgttgtgggaagcgggcatggaggatgcattatcattattatttaacgccttccatttggattcacaaatgttacgcacattcaacattttatggaaactataattttgtgaaaacaaataacaagaaaactcgtcatcgttcaaatttttaacgatagtaaaccgattaaacgtcgagctaatttctaacgctagcgactctgttggatatgggtttccagatatatatcttttcagttcccctacgtatctataatcatctgtaggaaatggaagatatttccatttatctactgttcctaatatcatatgtggtggtgtagtagaaccattaagcgcgaaagatgttatttcgcatcgtattttaacttcgcaataatttctggttagataacgcactctaccagtcaagtcaatgatattagcctttacagatatattcatagtagtcgtaacgatgactccatcttttagatgcgatactcctttgtatgtaccagaatcttcgtacctcaaactcgatatatttaaacaagttaatgagatattaacgcgttttatgaatgatgatatataaccagaagttttatcctcggtggctagcgctataaccttatcattataataccaactagtgtgattaatatgtgacacgtcagtgtgggtacaaatatgtacattatcgtctacgtcgtattcgatacatccgcatacagccaacaaatataaaatgacaaatactctaacgccgttcgtacccatcttgatgcggtttaataaatgttttgatttcaatttattgtaaaaaaagattcggttttatactgttcgatattctcattgcttatattttcatctatcatctccacacagtcaaatccgtggttagcatgcacctcatcaaccggtaaaagactatcggactcttctatcattataactctagaatatttaatttggtcattattaatcaagtcaattatcttatttttaacaaacgtgagtattttactcattttttataaaaacttttagaaatatacagactctatcgtgtgtctatatcttctttttatatccaatgtatttatgtctgatttttcttcatttatcatatataatggtccaaattctacacgtgcttcggattcatccagatcattaaggttcttataattgtaacatccttctcttccctcttctacatcttccttcttattcttattcttagcgtcacagaatctaccacagcaggatcccatgacgagcgtcatattaaactaatccattttcaattataatatatgattagtaatgaccattaaaataaaaaatattcttcataaccggcaagaaagtgaaaagttcacattgaaactatgtcagtagtatacatcatgaaatgatgatatatatatactctattttggtggaggattatatgatataattcgtggataatcatttttaagacacatttctttattcgtaaatcttttcacgttaaatgagtgtccatattttgcaatttcttcatatgatggcggtgtacgtggacgaggctgctcctgttcttgttgtggtcgccgactgtcgtgtctgcgtttagatccctccattatcgcgattgcgtagatggagtactattttataccttgtaattaaatttttttattaattaaacgtataaaaacgttccgtatctgtatttaagagccagatttcgtctaatagaacaaatagctacagtaaaaataactagaataattgctacacccactagaaaccacggatcgtaatacggcaatcggttttcgataataggtggaacgtatattttatttaaggacttaacaattgtctgtaaaccacaatttgcttccgcggatcctgtattaactatctgtaaaagcatatgttgaccgggcggagccgaacattctccgatatctaatttctgtatatctataatattattaacctccgcatacgcattacagttcttttctagcttggataccgcactaggtacatcgtctagatctattcctatttcctcagcgatagctcttctatccttttccggaagcaatgaaatcacttcaataaatgattcaaccatgagtgtgaaactaagtcgagaattactcatgcatttgttagttattcggagcgcgcaatttttaaactgtcctataacctctcctatatgaatagcacaagtgacattagtagggatagaatgttgagctaatttttgtaaataactatctataaaaagattatacaaagttttaaactctttagtttccgccatttatccagtctgagaaaatgtctctcataataaatttttccaagaaactaattgggtgaagaatggaaacctttaatctatatttatcacagtctgttttggtacacatgatgaattcttccaatgccgtactaaattcgatatctttttcgatttctggatatgtttttaataaagtatgaacaaagaaatggaaatcgtaataccagttatgtttaactttgaaattgttttttattttcttgttaatgattccagccacttgggaaaagtcaaagtcgtttaatgccgatttaatacgttcattaaaaacaaactttttatcctttagatgaattattattggttcattggaatcaaaaagtaagatattatcgggtttaagatctgcgtgtaaaaagttgtcgcaacagggtagttcgtagattttaatgtataacagagccatctgtaaaaagataaactttatgtattgtaccaaagatttaaatcctaatttgatagctaactcggtatctactttatctgccgaatacagtgctaggggaaaaattataatgtttcctctttcatattcgtagttagttctcttttcatgttcgaaaaagtgaaacatgcggttaaaatagtttataacattaatattactgttaataactgccggataaaagtgggatagtaatttcacgaatttgatactgtcctttctctcgttaaacgcctttaaaaaaactttagaagaatatctcaatgagagttcctgaccatccatagtttgtatcaataatagcaacatatgaagaacacgtttatacagagtatgtaaaaatgttaatttatagtttaatcccatggcccacgcacacacgattaattttttttcatctccctttagattgttgtatagaaatttgggtactgtgaactccgccgtagtttccatgggactatataattttgtggcctcgaatacaaattttactacatagttatctatcttaaagactataccatatcctcctgtagatatgtgataaaaatcgtcgtttataggataaaatcgtttatccttttgttggaaaaaggatgaattaatgtaatcattctcttctatctttagtagtgtttccttattaaaattcttaaaataatttaacaatctaactgacggagcccaattttggtgtaaatctaattgggacattatattgttaaaatacaaacagtctcctaatataacagtatctgataatctatggggagacatccattgatattcaggggatgaatcattggcaacacccatttattgtacaaaaagccccaatttacaaacgaaagtccaggtttgatagagacaaacaattaactattttgtctctgtttttaacacctccacagtttttaatttctttagtaatgaaattattcacaatatcagtatcttctttatctaccagagattttactaacttgataaccttggctgtctcattcaatagggtagtaatatttgtatgtgtgatattgatatctttttgaattgtttcttttagaagtgattctttgatggtgccagcatacgaattacaataatgcagaaactcggttaacatgcaggaattatagtaagccaattccaattgttgcctgtgttgtattagagtgtcaatatgagcaatggtgtccttgcgtttctctgatagaatgcgagcagcgattttggcgttatcatttgacgatatttctggaatgacgaatcctgtttctactaactttttggtaggacaaagtgaaacaatcaagaagatagcttctcctcctatttgtggaagaaattgaactcctctagatgatctactgacgatagtatctccttgacagatattggaccgaattacagaagtacctggaatgtaaagccctgaaaccccctcattttttaagcagattgttgccgtaaatcctgcactatgcccaagatagagagctcctttggtgaatccatctctatgtttcagtttaaccaagaaacagtcagctggtctaaaatttccatctctatctaatacagcatctaacttgatgtcaggaactatgaccggtttaatgttatatgtaacattgagtaaatccttaagttcataatcatcactgtcatcagttatgtacgatccaaacaatgtttctaccggcatagtggatacgaagatgctatccatcagaatgtttccctgattagtattttctatatagctattcttctttaaacgattttccaaatcagtaactatgttcatttttttaggagtaggacgcctagccagtatggaagaggattttctagatcctctcttcaacatctttgatctcgatggaatgcaaaaccccatagtgaaacaaccaacgataaaaataatattgtttttcactttttataattttaccatctgactcatggattcattaatatctttataagagctactaacgtataattctttataactgaactgagatatatacaccggatctatggtttccataattgagtaaatgaatgctcggcaataactaatggcaaatgtatagaacaacgaaattatactagagttgttaaagttaatattttctatgagctgttccaataaattatttgttgtgactgcgttcaagtcataaatcatcttgatactatccagtaaaccgtttttaagttctggaatattatcatcccattgtaaagcccctaattcgactatcgaatatcctgctctgatagcagtttcaatatcgacggacgtcaatactgtaataaaggtggtagtattgtcatcatcgtgataaactacgggaatatggtcgttagtaggtacggtaactttacacaacgcgatatataactttccttttgtaccatttttaacgtagttgggacgtcctgcagggtattgttttgaagaaatgatatcgagaacagatttgatacgatatttgttggattcctgattattcactataatataatctagacagatagatgattcgataaatagagaaggtatatcgttggtaggataatacatccccattccagtattctcggatactctattgatgacactagttaagaacatgtcttctattctagaaaacgaaaacatcctacatggactcattaaaacttctaacgctcctgattgtgtctcgaatgcctcgtacaaggatttcaaggatgccatagattctttgaccaacgatttagaattgcgtttagcatctgatttttttattaaatcgaatggtcggctctctggtttgctaccccaatgataacaatagtcttgtaaagataaaccgcaagaaaatttatacgcatccatccaaataaccctagcaccatcggatgatattaatgtattattatagattttccatccacaattattgggccagtatactgttagcaacggtatatcgaatagattactcatgtaacctactagaatgatagttcgtgtactagtcataatatctttaatccaatctaaaaaatttaaaattagattttttacactgttaaagttaacaaaagtattacccgggtacgtggatatcatatatggcattggtccattatcagtaatagctccataaactgatacggcgatggtttttatatgtgtttgatctaacgaggaagaaattcgcgcccacaattcatctctagatatgtatttaatatcaaacggtaacacatcaatttcgggacgcgtatatgtttctaaatttttaatccaaatataatgatgacctatatgccctattatcatactgtcaactatagtacacctagggaacttacgatacatctgtttcctataatcgttaaattttacaaatctataacatgctaaaccttttgacgacagccattcattaatttctgatatggaatctgtattctcgataccgtatcgttctaaagccagtgctatatctccctgttcgtgggaacgctttcgtataatatcgatcaacggataatctgaagtttttggagaataatatgactcatgatctatttcgtccataaacaatctagacataggaattggaggcgatgatcttaattttgtgcaatgagtcgtcaatcctataacttctaatcttgtaatattcatcatcgacataatactatctatgttatcatcgtatattagtataccatgaccttcttcatttcgtgccaaaatgatatacagtcttaaatagttacgcaatatctcaatagtttcataattgttagctgttttcatcaaggtttgtatcctgtttaacatgatggcgttctataacgtctctattttctatttttaattttttaaatttttaacgatttactgtggctagatacccaatctctctcaaatatttttttagcctcgcttacaagctgtttatctatactattaaaactgacgaatccgtgattttggtaatgggttccgtcgaaatttgccgaagtgatatgaacatattcgtcgtcgactatcaacaattttgtattattctgaatagtgaaaaccttcacagatagatcattttgaacacacaacgcatctagacttttggcggttgccatagaatatacgtcgttcttatcccaattaccaactagaagtctgatcttaactcctctattaatggctgcttctataatggagttgtaaatgtcgggccaatagtagctattaccgtcgacacgtgtagtgggaactatggccaaatgttcaatatctatactagtcttagctgacctgagtttatcaataactacatcggtatctagatctctagaatatcccaataggtgttccggagaatcagtaaagaacactccacctataggattcttaatatgatacgcagtgctaactggcaaacaacaagccgcagagcataaattcaaccatgaattttttgcgctattaaaggctttaaaagtatcaaatcttctacgaagatctgtggccagcgggggataatcagaatatacacctaacgttttaatcgtatgtatagatcctccagtaaatgacgcgtttcctacataacatctttcatcatctgacacccaaaaacaaccgagtagtagtcccacattattttttttatctatattaacggttataaaatttatatccgggcagtgactttgtagctctcccagatttcttttccctcgttcatctagcaaaactattattttaatccctttttcagatgcctcttttagtttatcaaaaataagcgctcccctagtcgtactcagaggattacaacaaaaagatgctatgtatatatatttcttagctagagtgataatttcgttaaaacattcaaatgttgttaaatgatcggatctaaaatccatattttctggtagtgtttctaccagcctacattttgctcccgcaggtaccgatgcaaatggccacatttagttaacataaaaacttatacatcctgttctatcaacgattctagaatatcatcggctatatcgctaaaattttcatcaaagtcgacatcacaacctaactcagtcaatatattaagaagttccatgatgtcatcttcgtctatttctatatccgtatccattgtagattgttgaccgattatcgagtttaaatcattactaatactcaatccttcagaatacaatctgtgtttcattgtaaatttataggcggtgtatttaagttggtagattttcaattatgtattaatatagcaacagtagttcttgctcctccttgattctagcatcctcttcattattttcttctacgtacataaacatgtccaatacgttagacaacacaccgacgatggcggccgcaggatcctgcgaagctttccagacattgttgaattagatcgataaaaattaattaatcagaggtttgtctcctgctggtctcgaccaccatcatgtccaacacagggggtccaagagccagccccctccagctccttctgccccaagaaaaacagacgatcctcattggtgggcaggaagccagggggcttcttgtttccagtggggagttcttcaggacccttgaccaagttgtcatccaggatggccacttcttccttgggggccactgatgctgtctgccgtgcgaggtcccaccacaacaatcccggggccagggtgctgcgcttggtggggcctgtcaggcagctgatgagggctccgcacagcacagtggtcagcgtgcccagggcaccgtaatagagataggagatggcatagaagctgtcagctaaggcgggtcggctggcgtccattcctgagctgggggccctgctggagtcgttagcagggaggagagccgggtccaggaggccagaggcgttgactgagagagccacgcagcgggcagccgacgatggcaggaccctcatggtctgctcgctgggtgggtacagcgtggcgcccaaggccacccacagcgacagcgccaagcccgcgcctagtcccgcgaggacgcccggtgtgttgcaggccggcaggaacattcccaagatgaaggctcccagcagggggccgctgatgactcccatgacggtgaaggagccctgaaggacacctcctccgagcagtgaggacagggctgccacggtgagacaggccgatccgtagatgagtgagagccccttggagataatcacgagtttcctgggtgccaggctccgcagccgaggtttgatgaggtcttctacagtgactgcagccatagcattgatgctggtggatgctgtgctgagggtgccactgtaagcacaggccaggaaaagcccggggactccaggcagatcttcgaagatgtccagcaccagcagaggcatgtactggtctggggcagagatgcgccccaggaggagagggtcgcagtcagtgtagaacacaaacatgacgatgccacagcaggcagcgctggacacgatcaggaacaggccgacctggttgatgagcagggccagcttggcctgcttctctgtgcggcaagccacgtagcgctgcacctgcgcctggttcacgccatacatggagagccacaccaacgtgccacccaccacaaaagtccagaatgtatagcggctcctcgggtcagggttaaagtccatgaggttgatccgggagtggttctgggccagcgtgagcacctggcggggcccgcccacaagcatgacaccgcgtgccaggacaacccagaagccacttagcatcaccacgacctggaacacatcagtccagaccacagccttcatgccgcccacagccgtgtagaaggtgcagataattccggtggacaggagcgacgcccagatgtccagcccggtcacttggttcaggatgagggccggtgcgtagattacgatgccggtgtacagcatcgtggctacaatgtactgcaaagtcccgcagagccgcactgcgcggctgaagcgcatctccaggtactcgtaggtgctggtgaggcccaggcggtagaagacgggcatgaagagcagggcggtgaggaccgagttcagaagctggcccaggcacatccagaggaacttgaggccatagcgataggcctccgacggcacgcccagcacctgcacggccgacatgaagctggcagacagcgacaggcccacgggcagggccgccaggcgccggcccccggtgaagaagtcctcagcgctgcgctgcccgccccgagccagcccgacccacagcccgatgccagtggacaccaggagcatgagggcaaagaccccgtagtcccaggctccgaaggtgggccgttccccggtctccacggcctccatggtggtcgacttcgagcaaaaaaagacgctagtttttcaatttttaagcttacagacacgaatatgactaaaccgatgaccatttaaaaacccctctctagctttcacttaaactgtatcgatcattcttttagcacatgtataatataaaaacattattctatttcgaatttaggcttccaaaaatttttcatccgtaaaccgataataatatatatagacttgttaatagtcggaataaatagattaatgcttaaactatcatcatctccacgattagagatacaatatttacattctttttgctgtttcgaaactttatcaatacacgttaatacaaacccaggaaggagatattgaaactgaggctgttgaaaatgaaacggtgaatacaataattcagataatgtaaaatcatgattccgtattctgatgatattagaactgctaatggatgtcgatggtatgtatctaggagtatctattttaacaaagcatcgatttgctaatatacaattatccttttgattaattgttattttattcatattcttaaaaggtttcatatttatcaattcttctacattaaaaatttccatttttaatttatgtagccccgcaatactcctcattacgtttcattttttgtctataatatccattttgttcatctcggtacatagattatccaattgagaagcgcatttagtagttttgtacattttaagtttattgacgaatcgtcgaaaactagttatagttaacattttattatttgataccctgatattaatacccctgccgttactattatttataactgatgtaatccacgtaacattggaattaactatcgatagtaatgcatcgacgcttccaaaattgtctattataaactcaccgataatttttttattgcatgttttcatattcattaggattatcaaatctttaatcttattacgattgtatgcgttgatattacaagacgtcattctaaaagacggaggatctccatcaaatgccagacaatcacgtacaaagtacatggaaataggttttgttctattgcgcatcatagatttatatagaacacccgtagaaatactaatttgttttactctataaaatactaatgcatctatttcatcgttttgtataacgtctttccaagtgtcaaattccaaatttttttcattgatagtaccaaattcttctatctctttaactacttgcatagataggtaattacagtgatgcctacatgccgttttttgaaactgaatagatgcgtctagaagcgatgctacgctagtcacaatcaccactttcatatttagaatatatatatgtaaaaatatagtagaatttcattttgtttttttctatgctataaatgaattctcattttgcatctgctcatactccgttttatattaataccaaagaaggaagatatctggttctaaaagccgttaaagtatgcgatgttagaactgtagaatgcgaaggaagtaaagcttcctgcgtactcaaagtagataaaccctcatcgcccgcgtgtgagagaagaccttcgtccccgtccagatgcgagagaatgaataaccctggaaaacaagttccgtttatgaggacggacatgctacaaaatatgttcgcggctaatcgcgataatgtagcttctagacttttgtcctaaaatactattatatccttttcgatattaataaatccgtgtcgtccaggttttttatctctttcagtatgtgaatagataggtattttatctctattcatcatcgaatttaagagatccgataaacattgtttgtattctccagatgtcagcatctgatacaacaatatatgtgcacataaacctctggcacttatttcatgtaccttccccttatcactaaggagaatagtatttgagaaatatgtatacatgatattatcatgaattagatatacagaatttgtaacactctcgaaatcacacgatgtgtcggcgttaagatctaatatatcactcgataacacattttcatctagatacactagacattttttaaagctaaaatagtctttagtagtaacagtaactatgcgattattttcatcgatgatacatttcatcggcatattattacgcttaccatcaaagactataccatgtgtatatctaacgtattctagcatggttgccatacgcgcattaaacttttcaggatctttggatagatcttccaatctatctatttgagaaaacatttttatcatgttcaatagttgaaacgtcggatccactatatagatattatctataaagattttaggaactacgttcatggtatcctggcgaatattaaaactatcaatgatatgattatcgttttcatcttttatcaccatatagtttctaagatatgggattttacttaatataatattatttcccgtgataaattttattagaaaggccaaatctataagaaaagtcctagaattagtctgaagaatatctatatcgccgtatagtatatttggattaattagatatagagaatatgatccgtaacatatacaacttttattatggcgtctaagatattcttccatcaacttattaacatttttgactagggaagatacattatgacgtcccattacttttgccttgtctattactgcgacgttcatagaatttagcatatctcttgccaattcttccattgatgttacattataagaaattttagatgaaattacatttggagctttaatagtaagaactcctaatatgtccgtgtatgtggtcactaatacagattgtagttctataatcgtaaataatttacctatattatatgtttgagtctgtttagaaaagtagctaagtatacgatcttttatttctgatgcagatgtattaacatcggaaaaaaatctttttttattcttttttactaaagatacaaatatgtctttgttaaaaacagttattttctgaatatttctagcttgtaattttaacatatgatattcgttcacactaggtactctgcctaaataggtttctataatctttaatgtaatattaggaaaagtattctgatcaggattcctattcattttgaggatttaaaactctgattattgtctaatatggtctctacgcaaactttttcacagagcgatagagtttttgataactcgtttttcttaagaaatataaaactactgtctccagagctcgctctatcttttattttatctaattcgatacaaactcctgatactggttcagaaagtaattcattaattttcagtcctttatagaagatatttaatatagataatacaaaatcttcagtttttgatatcgatctgattgatcctagaactagatatattaataacgtgctcattaggcagtttatggcagcttgataattagatatagtatattccagttcatatttattagataccgcattgcccagattttgatattctatgaattcctctgaaaataaatccaaaataactagacattctattttttgtggattagtgtactctcttccctctatcatgttcactactggtgtccacgatgataaatatctagagggaatataatatagtccataggatgccaatctagcaatgtcgaataactgtaattttattcttcgctcttcattatgaattgattcttgaggtataaacctaacacaaattatattattagacttttcgtatgtaatgtctttcatgttataagtttttaatcctggaatagaatctattttaatgaggcttttaaacgcagagttctccaacgagtcaaagcataatactctgttgtttttcttatatacgatgttacgattttcttctttgaatggaataggtttttgaattagtttataattacaacataatagataaggaagtgtgcaaatagtacgcggaaaaaacataatagctcccctgttttcatccatggttttaagtaaatgatcactggcttctttagtcaatggatattcgaacattaaccgtttcatcatcattggacagaatccatatttcttaatgtaaagagtgatcaaatcattgtgtttattgtaccatcttgttgtaaatgtgtattcggttatcggatctgctcctttttctattaaagtatcgatgtcaatctcgtctaagaattcaactatatcgacatatttcatttgtatacacataaccattactaacgtagaatgtataggaagagatgtaacgggaacagggtttgttgattcgcaaactattctaatacataattcttctgttaatacgtcttgcacgtaatctattatagatgccaagatatctatataattattttgtaagatgatgttaactatgtgatctatataagtagtgtaataattcatgtattttgatatatgttccaactctgtctttgtgatgtctagtttcgtaatatctatagcatcctcaaaaaatatattcgcatatattcccaagtcttcagttctatcttctaaaaaatcttcaacgtatggaatataataatctattttacctcttctgatatcattaatgatatagtttttgacactatcttctgtcaattgattcttattcactatatctaagaaacggatagcgtccctaggacgaactactgccattaatatctctattatagcttctggacataattcatctattataccagaattaatgggaactattccgtatctatctaacatagttttaagaaagtcagaatctaagacttgatgttcatatattggttcatacatgaaatgatctctattgatgatagtgactatttcattctctgaaaattggtaactcattctatatatgctttccttgttgatgaaggatagaatatactcaatagaatttgtaccaacaaactgttctcttatgaatcgtatatcatcatctgaaataatcatgtaaggcatacatttaacaattagagacttgtctcctgttatcaatatactattcttgtgataatttatgtgtgaggcaaatttgtccacgttctttaattttgttatagtagatatcaaatccaatggagctacagttcttggcttaaacagatatagtttttctggaacaaattctacaacattattataaaggactttgggtagataagtgggatgaaatcctattttaattaatgcgatagccttgtcctcgtgcagatatccaaacgcttttgtgatagtatggcattcattgtctagaaacgctctacgaatatctgtgacagatatcatctttagagaatatactagtcgcgttaatagtactacaatttgtattttttaatctatctcaataaaaaaattaatatgtatgattcaatgtataactaaactactaactgttattgataactagaatcagaatctaatgatgacgtaaccaagaagtttatctactgccaatttagctgcattatttttagcatctcgtttagattttccatcggccttatcgaatactcttccgtcgatgtctacacaggcataaaatgtaggagagttactaggcccaactgattcaatacgaaaagaccaatctctcctagtaatttggcagtactcattaataacggtgacagggttagcatctttccaatcaataatttttttagccggaataacatcatcaaaagacttatgatcctctctcattgatttttcgcgggatacatcatctattatgacgtcagccatagcatcagcatccggcttatccgcctccgttgtcataaaccaacgaggaggaatatcgtcggagctgtacaccatagcactacgttgaagatcgtacagagctttattaacttctcgcttctccatattaagttgtctagttagttgtgcagcagtagctccttcgattccaatgtttttaatagccgcacacacaatctctgcgtcagaacgctcgtcaatatagatcttagacatttttagagagaactaacgcaaccagcaataaaactgaacctactttatcatttttttattcatcatcctctggtggttcgtcgttcctatcaaatgtagctctgattaacccgtcatctataggtgatgctggttctggagattctggaggagatggattattatctggaagaatctctgttatttccttgttttcatgtatcgattgcgttgtaacattaagattgcgaaatgctctaaatttgggaggcttaaagtgttgtttgcaatctctacacgcgtgtctaactagtggaggttcgtcagctgctctagtttgaatcatcatcggcgtagtattcctacttttacagttaggacacggtgtattgtatttctcgtcgagaacgttaaaataatcgttgtaactcacatcctttattttatctatattgtattctactcctttcttaatgcattttataccgaataagagatagcgaaggaattctttttcggtgccgctagtacccttaatcatatcacatagtgttttatattccaaatttgtggcaatagacggtttatttctatacgatagtttgtttctggaatcctttgagtattctataccaatattattctttgattcgaatttagtttcttcgatattagattttgtattacctatattcttgatgtagtactttgatgatttttccatggcccattctattaagtcttccaagttggcatcatccacatattgtgatagtaattctcggatatcagtagcggctaccgccattgatgtttgttcattggatgagtaactactaatgtatacattttccatttataacacttatgtattaactttgttcatttatattttttcattattatgttgatattaacaaaagtgaatatatatatgttaataattgtattgtggttatacggctacaattttataatgagtgaaagtcagtgtccgatgatcaatgacgatagctttactctgaaaagaaagtatcaaatcgatagtgcggagtcaacaataaaaatggataagaagaggataaagtttcagaatagagccaaaatggtaaaagaaataaatcagacaataagagcagcacaaactcattacgagacattgaaactaggatacataaaatttaagagaatgattatgactactactctagaagatatagcaccatctattccaaataatcagaaaacttataaactattctcggacatttcagccatcggcaaagcatcacagaatccgagtaagatggtatatgctctgctgctttacatgtttcccaatttgtttggagatgatcatagattcattcgttatagaatgcatccaatgagtaaaatcaaacacaagatcttctctcctttcaaacttaatcttattagaatattagtggaagaaagattctataataatgaatgcagatctaataaatggagaataattggaacacaagttgataaaatgttgatagctgaatctgataaatatacaatagatgcaaggtataacctaaaacccatgtatagaatcaagggagaatctgaagaagataccctctttatcaaacagatggtagaacaatgtgtgacatcccaggaattggtggaaaaagtgttgaagatactgtttagagatttgttcaagagtggagaatacaaagcgtacagatacgatgatgatgtagaaaatggatttattggattggatacactaaaattaaacattgttcatgatatagttgaaccatgtatgcctgttcgtaggccagtggctaagatactgtgtaaagaaatggtaaataaatactttgagaatccgctacatattattggtaaaaatcttcaagagtgcattgactttgttagtgaataggcatttcatctttctccaatactaattcaaattgttaaattaataatggatagtataaatagttattagttataagatagtaaaaataattattagaataagagtgtagtatcatagataactctcttctataaaaatggattttattcgtagaaagtatcttatatacacagtagaaaataatatagattttttaaaggatgatacattaagtaaagtaaacaattttaccctcaatcatgtactagctctcaagtatctagttagcaattttcctcaacacgttattactaaggatgtattagctaataccaatttttttgttttcatacatatggtacgatgttgtaaagtgtacgaagcggttttacgacacgcatttgatgcacccacgttgtacgttaaagcattgactaagaattatttatcgtttagtaacgcaatacaatcgtacaaggaaaccgtgcataaactaacacaagatgaaaaatttttagaggttgccgaatacatggacgaattaggagaacttataggcgtaaattatgacttagttcttaatccattatttcacggaggggaacccatcaaagatatggaaatcatttttttaaaactgtttaagaaaacagacttcaaagttgttaaaaaattaagtgttataagattacttatttgggcatacctaagcaagaaagatacaggcatagagtttgcggataatgatagacaaaatatatacactctatttcaacaaactggtagaatcgtccatagcaatctaacagaaacgtttagagattatatctttcccggagataagactagctattgggtgtggttaaacgaaagtatagctaatgatgcggatatcgttcttaatagacacgccattaccatgtatgataaaattcttagttatatatactctgagataaaacaaggacgcgttaataaaaacatgcttaagttagtttatatctttgagcctgaaaaagatatcagagaacttctgctagaaatcatatatgatattcctggagatatcctatctattattgatgcaaaaaacgacgattggaaaaaatattttattagtttttataaagctaattttattaacggtaatacatttattagtgatagaacgtttaacgaggacttattcagagttgttgttcaaatagatcccgaatatttcgataatgaacgaattatgtctttattctctacgagtgctgcggacattaaacgatttgatgagttagatattaataacagttatatatctaatataatttatgaggtgaacgatatcacattagatacaatggatgatatgaagaagtgtcaaatctttaacgaggatacgtcgtattatgttaaggaatacaatacatacctgtttttgcacgagtcggatcccatggtcatagagaacggaatactaaagaaactgtcatctataaaatccaagagtagacggctgaacttgtttagcaaaaacattttaaaatattatttagacggacaattggctcgtctaggtcttgtgttagatgattataaaggagacttgttagttaaaatgataaaccatcttaagtctgtggaggatgtatccgcattcgttcgattttctacagataaaaaccctagtattcttccatcgctaatcaaaactattttagctagttataatatttccatcatcgtcttatttcaaaggtttttgagagataatctatatcatgtagaagaattcttggataaaagcatccatctaaccaagacggataagaaatatatacttcaattgataagacacggtagatcatagaacagaccaaatatattattaataatttgtatatacatagatataattatcacacatttttgataaatgggaactgctgcaacaattcagactcccaccaaattaatgaataaagaaaatgcagaaatgattttggaaaaaattgttgatcatatagttatgtatattagtgacgaatcaagtgattcagaaaataatcctgaatatattgattttcgtaacagatacgaagactatagatctctcattataaaaagtgatcacgagtttgtaaagctatgtaaaaatcatgcggagaaaagttctccagaaacgcaacaaatgattatcaaacacatatacgaacaatatcttattccagtatctgaagtactattaaaacctataatgtccatgggtgacataattacatataacggatgtaaagacaatgaatggatgctagaacaactctctaccctaaactttaacaatctccgcacatggaactcatgtagcataggcaatgtaacgcgtctgttttatacattttttagttatctgatgaaagataaactaaatatataagtataatcccattctaatactttaacctgatgtattagcatcttattagaatattaacctaactaaaagacataacataaaaactcattacatagttgataaaaagcggtaggatataaatattatggctgccaccgttccgcgttttgacgacgtgtacaaaaatgcacaaagaagaattctagatcaagaaacattttttagtagaggtctaagtagaccgttaatgaaaaacacatatctatttgataattacgcgtatggatggataccagaaactgcaatttggagtagtagatacgcaaacctagatgctagtgactattatcccatttcgttgggattacttaaaaagttcgagtttctcatgtctctatataaaggtcctattcccgtatatgaagaaaaagtaaatactgaattcatagccaatggatcgttctctggtagatacgtatcatatcttcgaaagttttctgcccttccaacaaacgagtttattagttttttgttactgacttccattccaatctataatatcttgttctggtttaaaaacacacagtttgatattactaaacacacattattcagatacgtctatacagataatgccaaacacctggcgttggctaggtatatgcatcaaacaggagactataagcctttgtttagtcgtctcaaagagaattatatatttaccggtcccgttccaataagtatcaaagatatagatcaccctaatcttagtagagcaagaagtccatccgattatgagacattagctaatattagtactatattgtactttaccaagtatgatccggtattaatgtttttattgttttacgtacctgggtattcaattactacaaaaattactccagccgtagaatatctaatggataaactgaatctaacaaagagcgacgtacaactgttgtaaattattttatgcttcgtaaaatgtaggttttgaaccaaacattctttcaaagaatgagatgcataaaactttattatccaatagattgactatttcggacgtcaatcgtttaaagtaaacttcgtaaaatattctttgatcactgccgagtttaaaacttctatcgataattgtctcatatgttttaatatttacaagttttttggtccatggtacattagccggacaaatatatgcaaaataatatcgttctccaagttctatagtttctggattatttttattatattcagtaactaaatacatattagggttatctgcggatttataatttgagtgatgcattctactcaacataaataattctagaggagacgatctactatcaaattcggatcgtaaatctgtttctaaagaacggagaatatctatacatacctgattagaattcatccgtccttcagacaacatctcagacagtctggttttgtacatcttaatcatattcttatgaaacttggaaacatctcttctagtttcactagtacctttattaattctctcaggtacagattttgaattcgacgatgctgagtatttcatcgttgtatatttcttcttcgattgcataatcagattcttatataccgcctcaaactctattttaaaattattaaacaatactctattattaatcagtcgttctaactctttcgctatttctatagacttatctacatcttgactgtctatctctgtaaacacggagtcggtatctccatacacgctacgaaaacgaaatctgtaatctataggcaacgatgttttcacaatcggattaatatctctatcgtccatataaaatggattacttaatggattggcaaaccgtaacataccgttagataactctgctccatttagtaccgattctagatacaagatcattctacgtcctatggatgtgcaactcttagccgaagcgtatgagtatagagcactatttctaaatcccatcagaccatatactgagttggctactatcttgtacgtatattgcatggaatcatagatggccttttcagttgaactggtagcctgttttagcatctttttatatctggctctctctgccaaaaatgttcttaatagtctaggaatggttccttctatcgatctatcgaaaattgctatttcagagatgaggttcggtagtctaggttcacaatgaaccgtaatatatctaggaggtggatatttctgaagcaatagctgattatttatttcttcttccaatctattggtactaacaacgacaccgactaatgtttccggagatagatttccaaagatacacacattaggatacagactgttataatcaaagattaatacattattactaaacattttttgttttggagcaaataccttaccgccttcataaggaaacttttgttttgtttctgatctaactaagatagttttagtttccaacaatagctttaacagtggacccttgatgactgtactcgctctatattcgaataccatggattgaggaagcacatatgttgacgcacccgcgtctgtttttgtttctactccataatactcccacaaatactgacacaaacaagcatcatgaatacagtatctagccatatctaaagctatgtttagattataatccttatacatctgagctaaatcaacgtcatcctttccgaaagataatttatatgtatcattaggtaaagtaggacataatagtacgactttaaatccattttcccaaatatctttacgaattactttacatataatatcctcatcaacagtcacataattacctgtggttaaaacctttgcaaatgcagcggctttgcctttcgcgtctgtagtatcgtcaccgatgaacgtcatttctctaactcctctatttaatactttacccatgcaactgaacgcgttcttggatatagaatccaatttgtacgaatccaatttttcaaatttttgaatgaatgaatatagatcgaaaaatatagttccattattgttattaacgtgaaacgtagtattggccatgccgcctactcccttatgactagactgatttctctcataaatacagagatgtacagcttcctttttgtccggagatctaaagataattttctctcctgttaataactctagacgattagtaatatatctcagatcaaagttatgtccgttaaaggtaacgacgtagtcgaacgttagttccaacaattgtttagctattcgtaacaaaactatttcagaacatagaactagttctcgttcgtaatccatttccattagtgactgtatcctcaaacatcctctatcgacggcttcttgtatttcctgttccgttaacatctcttcattaatgagcgtaaacaataatcgtttaccacttaaatcgatataacagtaacttgtatgcgagattgggttaataaatacagaaggaaacttcttatcgaagtgacactctatatctagaaataagtacgatcttgggatatcgaatctaggtatttttttagcgaaacagttacgtggatcgtcacaatgataacatccattgttaatctttgtcaaatattgctcgtccaacgagtaacatccgtctggagatatcccgttagaaatataaaaccaactaatattgagaaattcatccatggtggcattttgtatgctgcgtttctttggctcttctatcaaccacatatctgcgacggagcattttctatctttaatatctagattataacttattgtctcgtcaatgtctatagttctcatctttcccaacggcctcgcattaaatggaggaggagacaatgactgatatatttcgtccgtcactacgtaataaaagtaatgaggaaatcgtataaatacggtctcgccatttcgacatctggatttcagatataaaaatctgttttcaccgtgactttcaaaccaattaatgcaccgaacatccatttatagaatttagaaatatattttcatttaaatgaatcccaaacattggggaagagccgtatggaccattatttttatagtactttcgcaagcgggtttagacggcaacatagaagcgtgtaaacgaaaactatatactatagttagcactcttccatgtcctgcatgtagacggcacgcgactatcgctatagaggacaataatgtcatgtctagcgatgatctgaattatatttattattttttcatcagattatttaacaatttggcatctgatcccaaatacgcgatcgatgtgacaaaggttaaccctttataaacttaacccattataaaacttatgattagtcacaactgaaataaccgcgtgattattttttggtataattctacacggcatggtttctgtgactatgaattcaacccccgttacattagtgaaatctttaacaaacagcaagggttcgtcaaagacataaaactcattgtttacaatcgaaatagaccccctatcacacttaaaataaaaaatatccttatcctttaccaccaaataaaattctgattggtcaatgtgaatgtattcacttaacagttccacaaatttatttattaactccgaggcacatacatcgtcggtattttttatggcaaactttactcttccagcatccgtttctaaaaaaatattaacgagttccatttatatcatccaatattattgaaatgacgttgatggacagatgatacaaataagaaggtacggtacctttgtccaccatctcctccaattcatgctctattttgtcattaactttaatgtatgaaaacagtacgccacatgcttccatgacagtgtgtaacactttggatacaaaatgtttgacattagtataattgtccaagactgtcaatctataatagatagtagctataatatattctatgatggtattgaagaagatgacaaccttggcatattgatcatttaacacagacatggtatcaacagatagcttgaatgaaagagaatcagtaattggaataagcgtcttctcgatagagtgtccgtataccaacatgtctgatattttgatgtattccattaaattatttagttttttctttttattctcgttaaacagcatttctgtcaacggaccccaacatcgttgaccgattaagttttgattgatttttccgtgtaaggcgtatctagtcagatcgtatagcctatccaataatccatcgtctgtgtgtagatcacatcgtacactttttaattctctatagaagagcgacagacatctggagcaattacagacagcaatttctttattctctacagatgtaagatacttgaagacattcctatgatgatgcagaattttggataacacggtattgatggtatctgttaccataattcctttgatggctgatagtgtcagagcacaagatttccaatctttgacaatttttagcaccattatctttgttttgatatctatatcagacagcatggtgcgtctgacaacacagggattaagacggaaagatgaaatgattctctcaacatcttcaatagataccttgctattttttctggcattatctatatgtgcgagaatatcctctagagaatcagtatcctttttgatgatagtggatctcaatgacatgggacgtttaaaccttcttattctatcaccagattgcatggtgatttgtcttctttcttttatcataatgtaatctctaaattcatcggcaaattgtctatatctaaaatcataatatgagatgtttacctctacaaatatctgttcgtccaatgttagagtatttacatcagttttgtattccaaattaaacatggcaacggatttaattttatattcctctattaagtcctcgtcgataataacagaatgtagataatcatttaatccgtcgtacatggttggaagatgcttgttgacaaaatctttaattgtcttgatgaaggtgggactatatctaacatcttgattaataaaatttataacattgtccataggatactttgtaactagttttatacacatctcttcatcggtaagtttagacagaatatcgtgaacaggtggtatattatattcatcagatatacgaagaacaatgtccaaatctatattgtttaatatattatatagatgtagcgtagctcctacaggaatatctttaactaagtcaatgatttcatcaaccgttagatctattttaaagttaatcatataggcattgatttttaaaaggtatgtagccttgactacattctcattaattaaccattccaagtcattgtgtgtaagaagattatattctatcataagcttgactacatttggtcccgataccattaaagaattcttatgatataaggaaacagattttaggtactcatctactctacaagaattttggagagccttaacgatatcagtgacgtttattatttcaggaggaaagaatctaacattgagaatatcggaattaatagcttccagatacagtgattttggcaatagtccgtgtaatccataatccagtaacacgagctggtgcttgctagacaccttttcaatgtttaatttttttgaaataagctttgataaagccttcctcgcaaattccggatacatgaacatgtcggcgacatgattaagtattgttttttcattatttttatattttctcaacaagttctcaataccccaatagatgatagaatatcacccaatgcgtccatgttgtctatttccaacaggtcgctatatccaccaatagaagtttttccaaaaaagattctaggaacagttctaccaccagtaatttgttcaaaataatcccgcaattcattttcgggtttaaattctttaatatcgacaatttcatacgctcctcttttgaaactaaacttatttagaatatccagtgcatttctacaaaaaggacatgtatacttgacaaaaattgtcactttgttattggccaacctttgttgtacaaattcctcggccattttaatatttaagtgatataaaactatctcgacttatttaactctttagtcgagatatatggacgcagatagctatatgatagccaactacagaaggcaaacgctataaaaaacataattacgacgagcatatttataaatatttttattcagcattacttgatatagtaatattaggcacagtcaaacattcaaccactctcgatacattaactctctcattttctttaacaaattctgcaatatcttcgtaaaaagattcttgaaactttttagaatatctatcgactctagatgaaatagcgttcgtcaacatactatgttttgtatacataaaggcgcccattttaacagtttctagtgacaaaatgctagcgatcctaggatcctttagaatcacatagattgacgattcgtctctcttagtaactctagtaaaataatcatacaatctagtacgcgaaataatattatccttgacttgaggagatctaaacaatctagttttgagaacatcgataagttcatcgggaatgacatacatactatctttaatagaactcttttcatccagttgaatggattcgtccttaaccaactgattaatgagatcttctattttatcattttccagatgatatgtatgtccattaaagttaaattgtgtagcgcttctttttagtctagcagccaatactttaacatcactaatatcgatatacaaaggagatgatttatctatggcattaagaattcgtttttcgacatccgtcaaaaccaattcctttttgcctgtatcatccagttttccatcctttgtaaagaaattattttctactagactattaataagactgataaggattcctccataattgcacaatccaaactttttaacaaaactagactttacgagatctacaggaatgcgtacttcaggttttttagcttgtgattttttcttttgcggacattttctagtaaccaactcatctaccatttcattgattttagcagtgaaataagctttcaatgcacgggcactgatactattgaaaacgagttgatcttcaaattccgccatttaagttcaccaaacaacttttaaatacaaatatatcaatagtagtagaataagaactataaaaaaaataataattaaccaaccccaacaaccggtattattagttgatgtggtagttttctcatcacttagaacagatttaacaatttctataaagtctgtcaaatcatcttccggagaccccataaatacaccaaatatagcggcgtacaacttatccatttatacattgaatattggcttttctttatcgctatcttcatcatattcatcatcaatatcaacaagtcccagattacgagccagatcttcttctacattttcagtcattgatacacgttcactatctccagagagtccgataacgttagccaccacttctctatcaatgattagtttcttgagcgcgaaagtaatttttgtttccgttccggatctatagaagacgataggtgtgataattgccttggccaattgtctttctcttttactgagtgattctagttcaccttctatagatctgagaatggatgattctccagtcgaaacatattctaccatggatccgtttaatttgttgatgaagatggattcatccttaaatgttttctctgtaatagtttccaccgaaagactatgcaaagaatttggaatgcgttccttgtgcttaatgtttccatagacggcttctagaagttgatacaacataggactagccgcggtaacttttatttttagaaagtatccatcgcttctatcttgtttagatttatttttataaagtttagtctctccttccaacataataaaagtggaagtcatttgactagataaactatcagtaagttttatagagatagacgaacaattagcgtattgagaagcatttagtgtaacgtattcgatacattttgcattagatttactaatcgattttgcatactctataacacccgcacaagtctgtagagaatcgctagatgcagtaggtcttggtgaagtttcaactctcttcttgattaccttactcatgattaaacctaaataattgtactttgtaatataatgatatatattttcactttatctcatttgagaataaaaatgtttttgtttaaccactgcatgatgtacagatttcggaatcgcaaaccaccagtggttttattttatccttgtccaatgtgaattgaatgggagcggatgcgggtttcgtacgtagatagtacattcccgtttttagaccgagactccatccgtaaaaatgcatactcgttagtttggaataactcggatctgctatatggatattcatagattgactttgatcgatgaaggctcccctgtctgcagccatttttatgatcgtcttttgtggaatttcccaaatagttttataaactcgcttaatatcttctggaaggtttgtattctgaatggatccaccatctgccataatcctattcttgatctcatcattccataattttctctcggttaaaactctaaggagatgcggattaactacttgaaattctccagacaatactctccgagtgtaaatattactggtatacggttccaccgactcattatttcccaaaatttgagcagttgatgcagtcggcataggtgccaccaataaactatttctaagaccgtatgttctgattttatcttttagaggttcccaattccaaagatccgacggtacaacattccaaagatcatattgtagaataccgttactggcgtacgatcctacatatgtatcgtatggtccttccttctcagctagttcacaactcgcctctaatgcaccgtaataaatggtttcgaagatcttcttatttagatcttgtgcttccaggctatcaaatggataatttaagagaataaacgcgtccgctaatccttgaacaccaataccgataggtctatgtctcttattagagatttcagcttctggaataggataataattaatatctataattttattgagatttctgacaattactttgaccacatccttcagtttgagaaaatcaaatcgcccatctattacaaacatgttcaaggcaacagatgccagattacaaacggctacctcattagcatccgcatattgtattatctcagtgcaaagattactacacttgatagttcctaaattttgttgattactctttttgttacacgcatccttataaagaatgaatggagtaccagtttcaatctgagattctataatcgctttccagacgactcgagcctttattatagatttgtatctcctttctctttcgtatagtgtatacaatcgttcgaactcgtctccccaaacattgtccaatccaggacattcatccggacacatcaacgaccactctccgtcatccttcactcgtttcataaagagatcaggaatccaaagagctataaatagatctctggttctatgttcctcgtttcctgtattctttttaagatcgaggaacgccataatatcagaatgccacggttccaagtatatggccataactccaggccgtttgtttcctccctgatctatgtatctagcggtgttattataaactctcaacattggaataataccgtttgatataccattggtaccggagatatagcttccactggcacgaatattactaattgatagacctattccccctgccattttagagattaatgcgcatcgttttaacgtgtcatagataccctctatgctatcatcgatcatgttaagtagaaaacagctagacatttggtgacgactagttcccgcattaaataaggtaggagaagcgtgcgtaaaccatttttcagaaagtagattgtacgtctcaatagctgagtctatatcccattgatgaattcctactgcgacacgcattaacatgtgctgaggtctttcaacgatcttgttgtttattttcaacaagtaggatttttccaaagttttaaaaccaaaatagttgtatgaaaagtctcgttcgtaaataataaccgagttgagtttatccttatatttgttaactatatccatggtgatacttgaaataatcggagaatgtttcccatttttaggattaacatagttgaataaatcctccatcacttcactaaatagtttttttgtttccttgtgtagatttgatacggctattctggcggctagaatggcataatccggatgttgtgtagtacaagtggctgctatttcggctgccagagtgtccaattctaccgttgttactccattatatattccttgaataaccttcatagctattttaataggatctatatgatccgtgtttaagccataacataattttctaatacgagacgtgattttatcaaacatgacattttccttgtatccatttcgtttaatgacaaacatttttgttggtgtaataaaaaaattatttaacttttcattaatagggatttgacgtatgtagcgtacaaaatgattgttcctggtatatagataaagagtcctatatatttgaaaatcgttacggctcgattaaactttaatgattgcatagtgaatatatcattaggatttaactccttgactatcatggcggcgccagaaattaccatcaaaagcattaatacagttataccgatcgcagttagaacggttatagcatccaccatttatatctaaaaattagatcaaagaatatgtgacaaagtcctagttgtatactgagaattgacgaaacaatgtttcttacatatttttttcttattagtaaccgacttaatagtaggaactggaaaactagacttgattattctataagtatagatacccttccaaataatattctctttgataaaagttccagaaaatgtagaattttttaaaaagttatcttttgctattaccaagattgtgtttagacgcttattattaatatgagtgatgaaatccacaccgcctctagatatcgcctttatttccacattagatggtaaatccaatagtgaaactatctttttaggaatgtatggactcgcgtttagaggagtaaacgtcttaggcgtcggaaaggatgattcatcaaacgaataaacaatttcacaaatggatgttaatgtattagtaggaaattttttgacgctattggaattgaagattctaatggatgatgttctacctatttcatccgataacatgttaatttccgacaccaacggttttaatatttcgatgatatacggtagtctctctttcggacttatatagcttattccacaatacgagtcattatatactccaaaaaacaaaataactagtataaaatctgtatcgaatgggaaaaacgaaattatcgacataggtatagaatccggaacattgaacgtattaatacttaattctttttctgtggtaagtaccgataggttattgacattgtatggttttaaatattctataacttgagacttgatagatattagtgatgaattgaaaattatttttatcaccacgtgtgtttcaggatcatcgtcgacgcccgtcaaccaaccgaacggagtaaaataaatatcattaatatatgctctagatattagtatttttatcaatcctttgattatcatcttctcgtaggcgaatgattccatgatcaagagtgatttaagaacatcctccggagtattaatgggcttagtaaacagtccatcgttgcaataataaaagttatccaagttaaaggatattatgcattcgtttaaagatatcacctcatctgacggagacaattttttggtaggttttagagactttgaagctacttgtttaacaaagttattcatcgtcgtctactattctatttaattttgtagttaatttatcacatatcacattaattgactttttggtccacttttccatacgtttatattcttttaatcctgcgttatccgtttccgttatatccagggatagatcttgcaagttaaatagaatgctcttaaataatgtcattttcttatccgctaaaaatttaaagaatgtataaacctttttcagagatttgaaactcttaggtggtgtcctagtacacaatatcataaacaaactaataaacattccacattcagattccaacagctgattaacttccacattaatacagcctattttcgctccaaatgtacattcgaaaaatctgaataaaacatcgatgtcacaatttgtattatccaatacagaatgtttgtgattcgtgttaaaaccatcggagaaggaatagaaataaaaattattatagtggtggaattcagttggaatattgcctccggagtcataaaaggatactaaacattgttttttatcataaattacacatttccaatgagacaaataacaaaatccaaacattacaaatctagaggtagaacttttaattttgtctttaagtatatacgataagatatgtttattcataaacgcgtcaaatttttcatgaatcgctaaggagtttaagaatctcatgtcaaattgtcctatataatccacttcggatccataagcaaactgagagactaagttcttaatacttcgattgctcatccaggctcctctctcaggctctattttcatcttgacgacctttggattttcaccagtatgtattcctttacgtgataaatcatcgattttcaaatccatttgtgagaagtctatcgccttagatactttttcccgtagtcgaggtttaaaaaaatacgctaacggtatactagtaggtaactcaaagacatcatatatagaatggtaacgcgtctttaactcgtcggttaactctttcttttgatcgagttcgtcgctactattgggtctgctcaggtgccccgactctactagttccaacatcataccgataggaatacaagacactttgccggcggttgtagatttatcatatttttccactacatatccgttacaatttgttaaaaatttagatacatctatattgctacataatccagctagtgaatatatatgacataataaattggtaaatcctagttctggtattttactaattactaaatctgtatatctttccatttatcatggaaaagaatttaccagatatcttcttttttccaaactgcgttaatgtattctcttacaaatattcacaagatgaattcagtaatatgagtaaaacggaacgtgatagtttctcattggccgtgtttccagttataaaacatagatggcataacgcacacgttgtaaaacataaaggaatatacaaagttagtacagaagcacgtggaaaaaaagtatctcctccatcactaggaaaacccgcacacataaacctaaccgcgaagcaatatatatacagtgaacacacaataagctttgaatgttatagttttctaaaatgtataacaaatacagaaatcaattcgttcgatgagtatatattaagaggactattagaagctggtaatagtttacagatattttccaattccgtaggtaaacgaacagatactataggtgtactagggaataagtatccatttagcaaaattccattggcctcattaactcctaaagcacaacgagagatattttcagcgtggatttctcatagacctgtagttttaactggaggaactggagtgggtaagacgtcacaggtacccaagttattgctttggtttaattatttatttggtggattctctactctagataaaatcactgactttcacgaaagaccagtcattctatctcttcctaggatagctttagttagattgcatagcaataccattttaaaatcattgggatttaaggtactagatggatctcctatttctttacggtacggatctataccggaagaattaataaacaaacaaccaaaaaaatatggaattgtattttctacccataagttatctctaacaaaactatttagttatggcactcttattatagacgaagttcatgagcatgatcaaataggagatattattatagcagtagcgagaaagcatcatacgaaaatagattctatgtttttaatgactgccacgttagaggatgacagggaacggctaaaagtatttttacctaatcccgcatttatacatattcctggagatacactgtttaaaattagcgaggtatttattcataataagataaatccatcttccagaatggcatacatagaagaagaaaagagaaatttagttactgctatacagatgtatactcctcctgatggatcatccggtatagtctttgtggcatccgttgcacagtgtcacgaatataaatcatatttagaaaaaagattaccgtatgatatgtatattattcatggtaaggtcttagatatagacgaaatattagaaaaagtgtattcatcacctaatgtatcgataattatttctactccttatttggaatccagcgttactatacgcaatgttacacacatttatgatatgggtagagtttttgtccccgctccttttggaggatcgcaacaatttatttctaaatctatgagagatcaacgaaaaggaagagtaggaagagttaatcctggtacatacgtctatttctatgatctgtcttatatgaagtctatacagcgaatagattcagaatttctacataattatatattgtacgctaataagtttaatctaacactccccgaagatttgtttataatccctacaaatttggatattctatggcgtacaaaggaatatatagactcgttcgatattagtacagaaacatggaataaattattatccaattattatatgaagatgatagagtatgctaaactttatgtactaagtcctattctcgctgaggagttggataactttgagaggacgggagaattaactagtattgtacgagaagccattttatctctaaatttacaaattaagattttaaattttaaacataaagatgatgatacgtatatacacttttgtaaaatattattcggtgtctataacggaacaaacgctactatatattatcatagacctctaacgggatatatgaatatgatttcagatactatatttgttcctgtagataataactaaaaatcaaactctaatgaccacatctttttttagagatgaaaaattttccacatctccttttgtagacacgactaaacattttgcagaaaaaagtttattagtgtttagataatcgtatacttcatcagtgtagatagtaaatgtgaacagataaaaggtattcttgctcaatagattggtaaattccatagaatatattaatcctttcttcttgagatcccacatcatttcaaccagagacgttttatccaatgatttacctcgtactataccacatacaaaactagattttgcagtgacgtcgtacctggtattcctaccaaacaaaattttacttttagttcttttagaaaattctaaggtagaatctctatttgccaatatgtcatctatggaattaccactagcaaaaaatgatagaaatatatattgatacatcgcagctggttttgatctactatactttaaaaacgaatcagattccataattgcctgtatatcatcagctgaaaaactatgttttacacgtattccttcggcatttctttttaatgatatatcttgtttagacaatgataaagttatcatgtccatgagagacgcgtctccgtatcgtataaatatttcattagatgttagacgcttcattaggggtatacttctataaggtttcttaatcagtccatcattggttgcgtcaagaactactatcggatgttgttgggtatctctagtgttacacatggccttactaaagtttgggtaaataactatgatatctctattaattatagatgcatatatttcattcgtcaaggatattagtatcgacttgctatcgtcattaatacgtgtaatgtaatcatataaatcatgcgatagccaaggaaaatttaaatagatgttcatcatataatcgtcgctataattcatattaatacgttgacattgactaatttgtaatatagcctcgccacgaagaaagctctcgtattcagtttcatcgataaaggataccgttaaatataactggttgccgatagtctcatagtctattaagtggtaagtttcgtacaaatacagaatccctaaaatattatctaatgttggattaatctttaccataactgtataaaatggagacggagtcataactattttaccgtttgtacttactggaatagatgaaggaataatctccggacatgctggtaaagacccaaatgtctgtttgaagaaatccaatgttccaggtcctaatctcttaacaaaaattacgatattcgatcccgatatcctttgcattctatttaccagcatatcacgaactatattaagattatctatcatgtctattctcccaccgttatataaatcgcctccgctaagaaacgttagtatatccatacaatggaatacttcatttctaaaatagtattcgttttctaattctttaatgtgaaatcgtatactagaaagggaaaaattatctttgagttttccgttagaaaagaaccacgaaactaatgttctgattgcgtccgattccgttgctgaattaatggatttacaccaaaaactcatataacttctagatgtagaagcattcgctaaaaaattagtagaatcaaaggatataagtagatgttccaacaagtgagcaattcccaagatttcatctatatcattctcgaatccgaaattagaaattcccaagtagatatcctttttcatccgatcgttgatgaaaatacgaactttattcggtaagacaatcatttactaaggagtaaaataggaagtaatgttcgtatgtcgttatcatcgtataaattaaaggtgtgttttttaccattaagtgacattataattttaccaatattggaattataatataggtgtatttgcgcactcgcgacggttgatgcatcggtaaatatagctgtatctaatgttctagtcggtatttcatcatttcgctgtctaataatagcgttttctctatctgtttccattacagctgcctgaagtttattggtcggataatatgtaaaataataagaaatacatacgaataacaaaaataaaataagatataataaagatgccatttagagatctaattttgtttaacttgtccaaattcctacttacagaagatgaggaatcgttggagatagtgtcttccttatgtagaggatttgaaatatcttataatgacttgataacttactttccagataggaaataccataaatatatttataaagtatttgaacatgtagatttatcggaggaattaagtatggaattccatgatacaactctgagagatttagtctatcttagattgtacaagtattccaagtgtatacggccgtgttataaattaggagataatctaaaaggcatagttgttataaaggacaggaatatttatattagggaagcaaatgatgacttgatagaatatctcctcaaggaatacactcctcagatttatacatattctaatgagcgcgtccccataactggttcaaaattaattctttgtggattttctcaagttacatttatggcgtatacaacgtcgcatataacaacaaataaaaaggtagatgttctcgtttccaaaaaatgtatagatgaactagtcgatccaataaattatcaaatacttcaaaatttatttgataaaggaagcggaacaataaacaaaatactcaggaagatattttattcggtaacaggtggccaaactccataggtagctttttctatttcggattttagaatttccaaattcaccagcgatttatcggttttggtgaaatccaaggatttattaatgtccacaaatgccatttgttttgtctgtggattgtatttgaaaatggaaacgatgtagttagatagatgcgctgcgaagtttcctattagggttccgcgcttcacgtcacccagcatacttgaatcaccatcctttaaaaaaaatgataagatatcaacatggagtatatcatactcgaattttaattcttctactgactcactgacattttcacaaatactacaatacggtttaccgaaaataatcagtacgttcttcatttatgggtatcaaaaacttaaaatcgttactgctggaaaataaatcactgacgatattagatgataatttatacaaagtatacaatggaatatttgtggatacaatgagtatttatatagccgtcgccaattgtgtcagaaacttagaagagttaactacggtattcataaaatacgtaaacggatgggtaaaaaagggagggcatgtaaccctttttatcgatagaggaagtataaaaattaaacaagacgttagagacaagagacgtaaatattctaaattaaccaaggacagaaaaatgttagaattagaaaagtgtacatccgaaatacaaaatgttaccggatttatggaagaagaaataaaggcagaaatgcaattaaaaatcgataaactcacatttcaaatatatttatctgattctgataacataaaaatatcattgaatgagatactaacacatttcaacaataatgagaatgttacattattttattgtgatgaacgagacgcagaattcgttatgtgtctcgaggctaaaacacatttctctaccacaggagaatggccgttgataataagtaccgatcaggatactatgctatttgcatctgctgataatcatcctaagatgataaaaaacttaactcaactgtttaaatttgttccctcggcagaggataactatttagcaaaattaacggcgttagtgaatggatgtgatttctttcctggactctatggggcatctataacacccaccaacttaaacaaaatacaattgtttagtgattttacaatcgataatatagtcactagtttggcaattaaaaattattatagaaagactaactctaccgtagacgtgcgtaatattgttacgtttataaacgattacgctaatttagacgatgtctactcgtatattcctccttgtcaatgcactgttcaagaatttatattttccgcattagatgaaaaatggaatgaatttaaatcatcttatttagaaagcgtgccgttaccctgccaattaatgtacgcgttagaaccacgcaaggagattgatgtttcagaagttaaaactttatcatcttatatagatttcgaaaatactaaatcagatatcgatgttataaaatctatatcctcgatcttcggatattctaacgaaaactgtaacacgatagtattcggcatctataaggataatttactactgagtataaataattcattttactttaacgatagtctgttaataaccaatactaaaagtgataatataataaatataggttactagattaaaaatggtgttccaactcgtgtgctctacatgcggtaaagatatttctcacgaacgatataaattgattatacgaaaaaaatcattaaaggatgtactcgtcagtgtaaagaacgaatgttgtaggttaaaattatctacacaaatagaacctcaacgtaacttaacagtgcaacctctattggatataaactaatatggatccggttaattttatcaagacatatgcgcctagaggttctattatttttattaattataccatgtcattaacaagtcatttgaatccatcgatagaaaaacatgtgggtatttattatggtacgttattatcggaacacttggtagttgaatctacctatagaaaaggagttcgaatagtcccattggatagtttttttgaaggatatcttagtgcaaaagtatacatgttagagaatattcaagttatgaaaatagcagctgatacgtcattaactttattgggtattccgtatggatttggtcatgatagaatgtattgttttaaattggtagctgactgttataaaaatgccggtattgatacatcgtctaaacgaatattgggcaaagatatttttctgagccaaaacttcacagacgataatagatggataaagatatatgattctaataatttaacattttggcaaattgattaccttaaagggtgagttaatatgcataactactcctccgttgttttttccctcgttctttttcttaacgttgtttgccatcactctcataatgtaaagatattctaaaatggtaaacttttgcatatcggacgcagaaattggtataaatgttgtaattgtattatttcccgtcaatggactagtcacagctccatcagttttatatcctttagagtatttctcactcgtgtctaacattctagagcattccatgatctgtttatcgttgatattggccggaaagatagattttttattttttattatattactattggcaattgtagatataacttctggtaaatatttttctaccttttcaatctcttctattttcaagccggctatatattctgctatattgttgctagtatcaataccttttctggctaagaagtcatatgtggtattcactatatcagttttaactggtagttccattagcctttccacttctgcagaataatcagaaattggttctttaccagaaaatccagctactataataggctcaccgatgatcattggcaaaatcctatattgtaccagattaatgagagcatatttcatttccaataattctgctagttcttgagacattgatttatttgatgaatctagttggttctctagatactctaccatttctgccgcatacaataacttgttagataaaatcagggttatcaaagtgtttagcgtggctagaatagtgggcttgcatgtattaaagaatgcggtagtatgagtaaaccgttttaacgaattatatagtctccagaaatctgtggcgttacatacatgagccgaatgacatcgaagattgtccaatatttttaatagctgctctttgtccattatttctatatttgactcgcaacaattgtagataccattaatcaccgattcctttttcgatgccggacaatagcacaattgtttagctttggactctatgtattcagaattaatagatatatctctcaatacagattgcactatacattttgaaactatgtcaaaaattgtagaacgacgctgttctgcagccatttaactttaaataatttacaaaaatttaaaatgagcatccgtataaaaatcgataaactgcgccaaattgtggcatatttttcagagttcagtgaagaagtgtctataaatgtagactcgacggatgagttaatgtatatttttgccgccttgggcggatctgtaaacatttgggcaattatacctctaagtgcatcagtgttttaccgaggagccgaaaatattgtgtttaatcttcctgtgtccaaggtaaaatcgtgtttgtgtagttttcacaatgatgccatcatagatatagaacctgatctggaaaataatctagtaaaactttctagttatcatgtagtaagtgtcgattgtaacaaggaactgatgcctattaggacagatactactatttgtctaagtatagatcaaaagaaatcttacgtgtttaattttcacaagtatgaagaaaaatgttgtggtagaaccgtcattcatctagaatggttgttgggctttatcaagtgtattagtcagcatcagcatctggctattatgtttaaagatgacaatattattatgaagactcctggtaatactgatgcgttttccagggaatattctatgactgaatgttctcaagaactacaaaagttttctttcaaaatagctatctcgtctctcaacaaactacgaggattcaaaaagagagtcaatgtttttgaaactagaatcgtaatggataatgacgataacattttaggaatgttgttttcggatagagttcaatcctttaagatcaacatctttatggcgtttttagattaatactttcaatgagataaatatgggtggcggagtaagtgttgagctccctaaacgggatccgcctccgggagtacccactgatgagatgttattaaacgtggataaaatgcatgacgtgatagctcccgctaagcttttagaatatgtgcatataggaccactagcaaaagataaagaggataaagtaaagaaaagatatccagagtttagattagtcaacacaggacccggtggtctttcggcattgttaagacaatcgtataatggaaccgcacccaattgctgtcgcacttttaatcgtactcattattggaagaaggatggaaagatatcagataagtatgaagagggtgcagtattagaatcgtgttggccagacgttcacgacactggaaaatgcgatgttgatttattcgactggtgtcagggggatacgttcgatagaaacatatgccatcagtggatcggttcagcctttaataggagtaatagaactgtagagggtcaacaatcgttaataaatctgtataataagatgcaaacattatgtagtaaagatgctagtgtaccaatatgcgaatcatttttgcattatttacgcgcacacaatacagaagatagcaaagagatgatcgattatattctaagacaacagtctgcggactttaaacagaaatatatgagatgtagttatcccactagagataagttagaagagtcattaaaatatgcggaacctcgagaatgttgggatccagagtgttcgaatgccaatgttaatttcttactaacacgtaattataataatttaggactttgcaatattgtacgatgtaataccagcgtgaacaacttacagatggataaaacttcctcattaagattgtcatgtggattaagcaatagtgatagattttctactgttcccgtcaatagagcaaaagtagttcaacataatattaaacactcgttcgacctaaaattgcatttgatcagtttattatctctcttggtaatatggatactaattgtagctatttaaatgggtgccgcggcaagcatacagacgacggtgaatacactcagcgaacgtatctcgtctaaattagaacaagaagcgaacgctagtgctcaaacaaaatgtgatatagaaatcggaaatttttatatccgacaaaaccatggatgtaacctcactgttaaaaatatgtgctctgcggacgcggatgctcagttggatgctgtgttatcagccgctacagaaacatatagtggattaacaccggaacaaaaagcatacgtgccagctatgtttactgctgcgttaaacattcagacgagtgtaaacactgttgttagagattttgaaaattatgtgaaacagacttgtaattctagcgcggtcgtcgataacaaattaaagatacaaaacgtaatcatagatgaatgttacggagccccaggatctccaacaaatttggaatttattaatacaggatctagcaaaggaaattgtgccattaaagcgttgatgcaattgacgactaaggccactactcaaatagcacctagacaagttgctggtacaggagttcagttttatatgattgttatcggtgttataatattggcagcgttgtttatgtactatgccaagcgtatgttgttcacatccaccaatgataaaatcaaacttattttagccaataaggaaaacgtccattggactacttacatggacacattctttagaacttctccgatggttattgctaccacggatatgcaaaactgaaaatatattgataatattttaatagattaacatggaagttatcgctgatcgtctagacgatatagtgaaacaaaatatagcggatgaaaaatttgtagattttgttatacacggtctagagcatcaatgtcctgctatacttcgaccattaattaggttgtttattgatatactattatttgttatagtaatttatatttttacggtacgtctagtaagtagaaattatcaaatgttgttggtggtgctagtcatcacattaactattttttattactttatactataatagtactagactgacttctaacaaacatctcacctgccataaataaatgcttgatattaaagtcttctatttctaacactattccatctgtggaaaataatactctgacattatcgctaattgacacatcggtgagtgatatgcctataaagtaataatcttctttgggcacatataccagtgtaccaggttctaacaacctatttactggtgctcctgtagcatactttttctttaccttgagaatatccatcgtttgcttggtcaatagcgatatgtgattttttatcaaccactcaaaaaagtaattggagtgttcatatcctctacgggctattgtctcatggccgtgtatgaaatttaagtaacacgactgtggtagatttgttctatagagccgattgccgcaaatagatagaactaccaatatgtctgtacaaatgttaaacattaattgattaacagaaaaaacaatgttcgttctgggaatagaaaccagatcaaaacaaaattcgttagaatatatgccacgtttatacatggaatataaaataactacagtttgaaaaataacagtatcatttaaacatttaacttgcggggttaatctcacaactttactgtttttgaactgttcaaaatatagcatcgatccgtgagaaatacgtttagccgcctttaatagaggaaatcccaccgcctttctggatctcaccaacgacgatagttctgaccagcaactcatttcttcatcatccacctgttttaacatataataggcaggagatagatatccgtcattgcaatattccttctcgtaggcacacaatctaatattgataaaatctccattctcttctctgcatttattatcttgtctcggtggctgattaggctgtggtcttggtttaggccttggtctatcgttgttgaatctattttggtcattaaatctttcatttcttcctggtatatttctatcacctcgtttggttggatttttgtctatattatcgtttgtaacatcggtacgggtattcatttatcacaaaaaaaacttctctaaatgagtctactgctagaaaacctcatcgaagaagataccatattttttgcaggaagtatatctgagtatgatgatttacaaatggttattgccggcgcaaaatccaaatttccaagatctatgctttctatttttaatatagtacctagaacgatgtcaaaatatgagttggagttgattcataacgaaaatatcacaggagcaatgtttaccacaatgtataatataagaaacaatttgggtctaggagatgataaactaactattgaagccattgaaaactatttcttggatcctaacaatgaagttatgcctcttattattaataatacggatatgactgccgtcattcctaaaaaaagtggtaggagaaagaataagaacatggttatcttccgtcaaggatcatcacctatcttgtgcattttcgaaactcgtaaaaagattaatatttataaagaaaatatggaatccgcgtcgactgagtatacacctatcggagacaacaaggctttgatatctaaatatgcgggaattaatgtcctgaatgtgtattctccttccacatccataagattgaatgccatttacggattcaccaataaaaataaactagagaaacttagtactaataaggaactagaatcgtatagttctagccctcttcaagaacccattaggttaaatgattttctgggactattggaatgtgttaaaaagaatattcctctaacagatattccgacaaaggattgattactataaatggagaatgttcctaatgtatactttaatcctgtgtttatagagcccacgtttaaacattctttattaagtgtttataaacacagattaatagttttatttgaagtattcgttgtattcattctaatatatgtattttttagatctgaattaaatatgttcttcatgcctaaacgaaaaatacccgatcctattgatagattacgacgtgctaatctagcgtgtgaagacgataaattaatgatctatggattaccatggatgacaactcaaacatctgcgttatcaataaatagtaaaccgatagtgtataaagattgtgcaaagcttttgcgatcaataaatggatcacaaccagtatctcttaacgatgttcttcgcagatgatgattcattttttaagtatttggctagtcaagatgatgaatcttcattatctgatatattgcaaatcactcaatatctagactttctgttattattattgatccaatcaaaaaataaattagaagctgtgggtcattgttatgaatctctttcagaggaatacagacaattgacaaaattcacagactttcaagattttaaaaaactgtttaacaaggtccctattgttacagatggaagggtcaaacttaataaaggatatttgttcgactttgtgattagtttgatgcgattcaaaaaagaatcctctctagctaccaccgcaatagatcctgttagatacatagatcctcgtcgcaatatcgcattttctaacgtgatggatatattaaagtcgaataaagtgaacaataattaattctttattgtcatcatgaacggcggacatattcagttgataatcggccccatgttttcaggtaaaagtacagaattaattagacgagttagacgttatcaaatagctcaatataaatgcgtgactataaaatattctaacgataatagatacggaacgggactatggacgcatgataagaataattttgaagcattggaagcaactaaactatgtgatgtcttggaatcaattacagatttctccgtgataggtatcgatgaaggacagttctttccagacattgtttaattctgtgagcgtatggcaaacggtaccgagctcggtttggaattagtgaaagcttaaaaattgaaattttattttttttttttggaatataaataagctcgaagtcgaccaccatgttcttggctgttttgtattgccttctgtggagtttccagatctctgatggccattttcctcgagcctgtgcctcctctaagaacttgttggcaaaagaatgctgcccaccatggatgggtgatgggagtccctgcggccagctttcaggcagaggttcctgccaggatatccttctgtccagtgcaccatctggacctcagttccccttcaaaggggtggatgaccgtgagtcctggccctctgtgttttataataggacctgccagtgctcaggcaacttcatgggtttcaactgcggaaactgtaagtttggatttgggggcccaaattgtacagagaagcgagtcttgattagaagaaacatttttgatttgagtgtctccgaaaagaataagttcttttcttacctcactttagcaaaacatactatcagctcagtctatgtcatccccacaggcacctatggccaaatgaacaatgggtcaacacccatgtttaatgatatcaacatctacgacctctttgtatggatgcattactatgtgtcaagggacacactgcttgggggctctgaaatatggagggacattgattttgcccatgaagcaccagggtttctgccttggcacagacttttcttgttattgtgggaacaagaaattcgagaactaactggggatgagaacttcactgttccatactgggattggagagatgcagaaaactgtgacatttgcacagatgagtacttgggaggtcgtcaccctgaaaatcctaacttactcagcccagcatccttcttctcctcctggcagatcatttgtagcagatcagaagagtataatagccatcaggttttatgcgatggaacacctgagggaccactattacgtaatcctggaaaccatgacaaagccaaaacccccaggctcccatcttcagcagatgtggaattttgtctgagtttgacccagtatgaatctggatcaatggatagaactgccaatttcagctttagaaacacactggaaggatttgccagtccactcacagggatagcagatccttctcaaagtagcatgcacaatgccttacatatctttatgaatggaacaatgtcccaagtacagggatcggccaacgatcccatttttcttcttcaccatgcttttgtggacagtatttttgaacaatggctgcgaaggcaccgccctcttttggaagtttacccagaagccaatgcacctatcggccataacagagactcttacatggttcctttcataccgctctatagaaatggtgatttcttcataacatccaaggatctgggatatgactacagctacctccaagagtcagatccaggcttttacagaaattatattgagccttacttggaacaagccagtcgtatctggccatggcttcttggggcagcactggtgggagctgttattgctgcagctctctctgggcttagcagtaggctatgccttcagaagaagaagaagaagaagcaaccccaggaggaaaggcagccactcctcatggacaaagacgactaccacagcttgctgtatcagagccatctgtgattaattaatttttatcgatctaattcaacaatgtctggagagctcggatccttctgtgagcgtatggcaaacgaaggaaaaatagttatagtagccgcactcgatgggacatttcaacgtaaaccgtttaataatattttgaatcttattccattatctgaaatggtggtaaaactaactgctgtgtgtatgaaatgctttaaggaggcttccttttctaaacgattgggtgaggaaaccgagataaaccgagatagaaataataggaggtaatgatatgtatcaatcggtgtgtagaaagtgttacatcgactcataatattatattttttatctaaaaaactaaaaataaacattgattaaattttaatataatacttaaaaatggatgttgtgtcgttagataaaccgtttatgtattttgaggaaattgataatgagttagattacgaaccagaaagtgcaaatgaggtcgcaaaaaaactgccgtatcaaggacagttaaaactattactaggagaattattttttcttagtaagttacagcgacacggtatattagatggtgccaccgtagtgtatataggatctgctcccggtacacatatacgttatttgagagatcatttctataatttaggagtgatcatcaaatggatgctaattgacggccgccatcatgatcctattttaaatggattgcgtgatgtgactctagtgactcggttcgttgatgaggaatatctacgatccatcaaaaaacaactgcatccttctaagattattttaatttctgatgtgagatccaaacgaggaggaaatgaacctagtacggcggatttactaagtaattacgctctacaaaatgtcatgattagtattttaaaccccgtggcgtctagtcttaaatggagatgcccgtttccagatcaatggatcaaggacttttatatcccacacggtaataaaatgttacaaccttttgctccttcatattcagctgaaatgagattattaagtatttataccggtgagaacatgagactgactcgagttaccaaattagacgctgtaaattatgaaaaaaagatgtactaccttaataagatcgtccgtaacaaagtagttgttaactttgattatcctaatcaggaatatgactattttcacatgtactttatgctgaggaccgtgtactgcaataaaacatttcctactactaaagcaaaggtactatttctacaacaatctatatttcgtttcttaaatattccaacaacatcaactgaaaaagttagtcatgaaccaatacaacgtaaaatatctagcaaaaattctatgtctaaaaacagaaatagcaagagatccgtacgcggtaataaatagaaacgtactactgagatatactaccgatatagagtataatgatttagttactttaataaccgttagacataaaattgattctatgaaaactgtgtttcaggtatttaacgaatcatccataaattatactccggttgatgatgattatggagaaccaatcattataacatcgtatcttcaaaaaggtcataacaagtttcctgtaaattttctatacatagatgtggtaatatctgacttatttcctagctttgttagactagatactacagaaactaatatagttaatagtgtactacaaacaggcgatggtaaaaagactcttcgtcttcccaaaatgttagagacggaaatagttgtcaagattctctatcgccctaatataccattaaaaattgttagatttttccgcaataacatggtaactggagtagagatagccgatagatctgttatttcagtcgctgattaatcaattagtagagatgagataagaacattataataatcaataatatatcttatatcttatatcttatatcttatatcttgtttagaaaaatgctaatattaaaatagctaacgctagtaatccaatcggaagccatttgatatctataatagggtatctaatttcctgatttaaatagcggacagctatattctcggtagctactcgtttggaatcacaaacattatttacatctaatttactatctgtaatggaaacgtttcccaatgaaatggtacaatccgatacattgcattttgttatatttttttttaaagaggctggtaacaacgcatcgcttcgtttacatggctcgtaccaacaataatagggtaatcttgtatctattcctatccgtactatgcttttatcaggataaatacatttacatcgtatatcgtctttgttagcatcacagaatgcataaatttgttcgtccgtcatgataaaaatttaaagtgtaaatataactattatttttatagttgtaataaaaagggaaatttgattgtatactttcggttctttaaaagaaactgacttgataaaaatggctgtaatctctaaggttacgtatagtctatatgatcaaaaagagattaatgctacagatattatcattagtcatgttaaaaatgacgacgatatcggtaccgttaaagatggtagactaggtgctatggatggggcattatgtaagacttgtgggaaaacggaattggaatgtttcggtcactggggtaaagtaagtatttataaaactcatatagttaagcctgaatttatttcagaaattattcgtttactgaatcatatatgtattcactgcggattattgcgttcacgagaaccgtattccgacgatattaacctaaaagagttatcgggacacgctcttaggagattaaaggataaaatattatccaagaaaaagtcatgttggaacagtgaatgtatgcaaccgtatcaaaaaattactttttcaaagaaaaaggtttgtttcgtcaacaagttggatgatattaacgttcctaattctctcatctatcaaaagttaatttctattcatgaaaagttttggccattattagaaattcatcaatatccagctaacttattttatacagactactttcccatccctccgttgattattagaccggctattagtttttggatagatagtatacccaaagagaccaatgaattaacttacttattaggtatgatcgttaagaattgtaacttgaatgctgatgaacaggttatccagaaggcggtaatagaatacgatgatattaaaattatttctaataacactaccagtatcaatttatcatatattacatccggcaaaaataatatgattagaagttatatcgtcgcccgacgaaaagatcagaccgctagatctgtaattggtcccagtacatctatcaccgttaatgaggtaggaatgcccgcatatattagaaatacacttacagaaaagatatttgttaatgcctttacagtggataaagttaaacaactattagcgtcaaaccaagttaaattttactttaataaacgattaaaccaattaacaagaatacgccaaggaaagtttattaaaaataaaatacatttattgcctggtgattgggtagaagtagctgttcaagaatatacaagtattatttttggaagacagccgtctctacatagatacaacgtcatcgcttcatctatcagagctaccgaaggagatactatcaaaatatctcccggaattgccaactctcaaaatgctgatttcgacggggatgaggaatggatgatattagaacaaaatcctaaagctgtaattgaacaaagtattcttatgtatccgacgacgttactcaaacacgatattcatggagcccccgtttatggatctattcaagatgaaatcgtagcagcgtattcattgtttaggatacaagatctttgtttagatgaagtattgaacatcttggggaaatatggaagagagttcgatcctaaaggtaaatgtaaattcagcggtaaagatatctatacttacttgataggtgaaaagattaattatccgggtctcttaaaggatggtgaaattattgcaaacgacgtagatagtaattttgttgtggctatgaggcatctgtcattggctggactcttatccgatcataagtcgaacgtggaaggtatcaactttattatcaagtcatcttatgtttttaagagatatctatctatttacggttttggggtgacattcaaagatctgagaccaaattcgacgttcactaataaattggaggccatcaacgtagaaaaaatagaacttatcaaagaagcatacgccaaatatctcaacgatgtaagagacgggaaaatagttccattatctaaagctttagaggcggactatgtggaatccatgttatccaacttgacaaatcttaatatccgagagatagaagaacatatgagacaaacgctgatagatgatccagataataacctcctgaaaatggccaaagcgggttataaagtaaatcccacagaactaatgtatattctaggtacgtatggacaacaaaggattgatggtgaaccagcagagactcgagtattgggtagagttttaccttactatcttccagactctaaggatccagaaggaagaggttacattcttaattctttaacaaaaggattaacgggttctcaatattacttttcgatgctggttgccagatctcaatctactgatatcgtctgtgaaacatcacgtaccggaacactggctagaaaaatcattaaaaagatggaggatatggtggtcgacggatacggacaagtagttataggtaatacgctcatcaagtacgccgccaattataccaaaattctaggctcagtatgtaaacctgtagatcttatctatccagatgagtccatgacttggtatttggaaattagtgctctgtggaataaaataaaacagggattcgtttactctcagaaacagaaacttgcaaagaagacattggcgccgtttaatttcctagtattcgtcaaacccaccactgaggataatgctattaaggttaaggatctgtacgatatgattcataacgtcattgatgatgtgagagagaaatacttctttacggtatctaatatagattttatggagtatatattcttgacgcatcttaatccttctagaattagaattacaaaagaaacggctatcactatctttgaaaagttctatgaaaaactcaattatactctaggtggtggaactcctattggaattatttctgcacaggtattgtctgagaagtttacacaacaagccctgtccagttttcacactactgaaaaaagtggtgccgtcaaacaaaaacttggtttcaacgagtttaataacttgactaatttgagtaagaataagaccgaaattatcactctggtatccgatgatatctctaaacttcaatctgttaagattaatttcgaatttgtatgtttgggagaattaaatccaaacatcactcttcgaaaagaaacagataaatatgtagtagatataatagtcaatagattatacatcaagagagcagaaataaccgaattagtcgtcgaatatatgattgaacgatttatctcctttagcgtcattgtaaaggaatggggtatggagacattcattgaggacgaggataatattagatttactgtctacctaaatttcgttgaaccggaagaattgaatcttagtaagtttatgatggttcttccgggggcagccaacaagggaaagattagtaaattcaagattcctatctctgattatacgggatatgacgacttcaatcaaacaaaaaagctcaataagatgactgtagaactcatgaatctaaaagaattgggttctttcgatttggaaaacgtcaacgtgtatcctggagtatggaatacatacgatatcttcggtatcgaggccgctcgtgaatacttgtgcgaagccatgttaaacacctatggagaagggttcgattatctgtatcagccttgtgatcttctcgctagtttactatgtgctagttacgaaccagaatcagtgaataaattcaagttcggcgcagctagtactcttaagagagctacgttcggagacaataaagcattgttaaacgcggctcttcataaaaagtcagaacctattaacgataatagtagctgccacttttttagcaaggtccctaatataggaactggatattacaaatactttatcgacttgggtcttctcatgagaatggaaaggaaactatctgataagatatcttctcaaaagatcaaggaaatggaagaaacagaagacttttaattcttatcaataacatatttttctatgatctgtcttttaaacgatggattttccacaaatgcgcctctcaagtccctcatagaatgatacacgtataaaaaatatagcataggcaatgactccttatttttagacattagatatgccaaaatcatagccccgcttctatttactcccgcagcacaatgaaccaacacgggctcgtttcgttgatcacatttagataaaaaggcggttacgtcgtcaaaatatttactaatatcggtagttgtatcatctaccaacggtatatgaataatattaatattagagttaggtaatgtatatttatccatcgtcaaatttaaaacatatttgaacttaacttcagatgatggtgcatccatagcatttttataatttcccaaatacacattattggttacccttgtcattatagtgggagatttggctttgtgcatatctccagttgaacgtagtagtaagtatttatacaaacttttcttatccatttataacgtacaaatggataaaactactttatcggtaaacgcgtgtaatttagaatacgttagagaaaaggctatagtaggcgtacaagcagccaaaacatcaacacttatattctttgttattatattggcaattagtgcgctattactctggtttcagacgtctgataatccagtctttaatgaattaacgagatatatgcgaattaaaaatacggttaacgattggaaatcattaacggatagcaaaacaaaattagaaagtgatagaggtagacttctagccgctggtaaggatgatatatttgaattcaaatgtgtggatttcggcgcctattttatagctatgcgattggataagaaaacatatctgccgcaagctattaggcgaggtactggagacgcgtggatggttaaaaaggcggcaaaggtcgatccatctgctcaacaattttgtcagtatttgataaaacacaagtctaataatgttattacttgtggtaatgagatgttaaatgaattaggttatagcggttattttatgtcaccgcattggtgttccgattttagtaatatggaatagtgttagataaatgcggtaacgaatgttcctgtaaggaaccataacagcttagatttaacgttaaagatgagcataaacataataaacaaaattacaatcaaacttataacattaatatcaaacaatccaaaaaatgaaatcagtggagtagtaaacgcgtacataactcctggataacgtttagcagctgccgttcctattctagaccaaaaattcggtttcatgttttcgaaacggtattctgcaacaagtcgaggatcgtgttctacatatttggcggcattatccagtatctgcctattgatcttcatttcgttttcgattctggctatttcaaaataaaatcccgatgatagacctccagactttataatttcatctacgatgttcagcgccgtagtaactctaataatataggctgataagctaacatcataccctcctgtatatgtgaatatggcatgatttttgtccattacaagctcggttttaactttattgcctgtaataatttctctcatctgtaggatatctatttttttgtcatgcattgccttcaagacgggacgaagaaacgtaatatcctcaataacgttatcgttttctacaataactacatattctacctttttattttctaactcggtaaaaaaattagaatcccatagggctaaatgtctagcgatatttcttttcgtttcctctgtacacatagtgttacaaaaccctgaaaagaagtgagtatacttgtcatcatttctaatgtttcctccagtccactgtataaacgcataatccttgtaatgatctggatcatccttgactaccacaacatttcttttttctggcataacttcgttgtcctttacatcatcgaacttctgatcattaatatgctcatgaacattaggaaatgtttctgatggaggtctatcaataactggcacaacaataacaggagttttcaccgccgccatttagttattgaaattaatcatatacaactctttaatacgagttatattttcgtctatccattgtttcacattgacatatttcgacaaaaagatataaaatgcgtattccaatgcttctctgtttaatgaattactaaaatatacaaacacgtcactgtctggcaataaatgatatcttagaatattgtaacaatttattttgtattgcacatgttcgtgatctatgagttcttcttcgaatggcataggatctccgaatctgaaaacgtataaataggagttagaataataatatttgagagtattggtaatatataaactctttagcggtataattagtttttttctctcaatttctatttttagatgtgatggaaaaatgactaattttgtagcattagtatcatgaactctaatcaaaatcttaatatcttcgtcacacgttagctctttgaagtttttaagagatgcatcagttggttctacagatggagtaggtgcaacaattttttgttctacacatgtatgtactggagccattgttttaactataatggtgcttgtatcgaaaaactttaatgcagatagcggaagctcttcgccgcgactttctacgtcgtaattgggttctaacgccgatctctgaatggatactagttttctaagttctaatgtgattctctgaaaatgtaaatccaattcctccggcattatagatgtgtatacatcggtaaataaaactatagtatccaacgatcccttctcgcaaattctagtcttaaccaaaaaatcgtatataaccacggagatggcgtatttaagagtggattcttctaccgttttgttcttggatgtcatataggaaactataaagtccgcactactgttaagaatgattactaacgcaactatatagtttaaattaagcattttggaaacataaaataactctgtagacgatacttgactttcgaataagtttgcagacaaacgaagaaagaacagacctctcttaatttcagaagaaaactttttttcgtattcctgacgtctagagtttatatcaataagaaagttaagaattagtcggttaatgttgtatttcattacccaagtttgagatttcataatattatcaaaagacatgataatattaaagataaagcgctgactatgaacgaaatagctatatggttcgctcaagaatatagtcttgttaaacgtggaaacgataactgtatttttaatcacgtcagcggcatctaaattaaatataggtatatttattccacacactctacaatatgccacaccatcttcataataaataaattcgttagcaaaattattaattttagtgaaatagttagcgtcaactttcatagcttccttcaatctaatttgatgctcacacggtgcgaattccactctaacatcccttttccatgcctcaggttcatcgatctctataatatctagttttttgcgtttcacaaacacaggctcgtctctcgcgatgagatctgtatagtaactatgtaaatgataactagatagaaagatgtagctatatagatgacgatcctttaagagaggtataataactttaccccaatcagatagactgttgttatggtcttcggaaaaagaatttttataaatttttccagtattttccaaatatacgtacttaacatctaaaaaatccttaatgataataggaatggataatccgtctattttataaagaaatacatatcgcacattatacttttttttggaaatgggaataccgatgtgtctacataaatatgcaaagtctaaatattttttagagaatcttagttggtccaaattcttttccaagtacggtaatagatttttcatattgaacggtatcttcttaatctctggttctagttccgcattaaatgatgaaactaagtcactatttttataactaacgattacatcacctctaacatcatcatttaccagaatactgatcttcttttgtcgtaaatacatgtctaatgtgttaaaaaaaagatcatacaagttatacgtcatttcatctgtggtattcttgtcattgaaggataaactcgtactaatctcttctttaacagcctgttcaaatttatatcctatatacgaaaaaatagcaaccagtgtttgatcatccgcgtcaatattctgttctatcgtagtgtataacaatcgtatatcttcttctgtgatagtcgatacgttataaaggttgataacgaaaatatttttatttcgtgaaataaagtcatcgtaggattttggacttatattcgcgtctagtagatatgcttttatttttggaatgatctcaattagaatagtctctttagagtccatttaaagttacaaacaactaggaaattggtttatgatgtataatttttttagtttttatagattctttattctatacttaaaaaatgaaaataaatacaaaggttcttgagggttgtgttaaattgaaagcgagaaataatcataaattatttcattatcgcgatatccgttaagtttgtatcgtaatggcgtggtcaattacgaataaagcggatactagtagcttcacaaagatggctgaaatcagagctcatctaaaaaatagcgctgaaaataaagataaaaacgaggatattttcccggaagatgtaataattccatctactaagcccaaaaccaaacgagccactactcctcgtaaaccagcggctactaaaagatcaaccaaaaaggaggaagtggaagaagaagtagttatagaggaatatcatcaaacaactgaaaaaaattctccatctcctggagtcagcgacattgtagaaagcgtggccgctgtagagctcgatgatagcgacggggatgatgaacctatggtacaagttgaagctggtaaagtaaatcatagtgctagaagcgatctctctgacctaaaggtggctaccgacaatatcgttaaagatcttaagaaaattattactagaatctctgcagtatcgacggttctagaggatgttcaagcagctggtatctctagacaatttacttctatgactaaagctattacaacactatctgatctagtcaccgagggaaaatctaaagttgttcgtaaaaaagttaaaacttgtaagaagtaaatgcgtgcacttttttataaagatggtaaactctttaccgataataattttttaaatcctgtatcagacgataatccagcgtatgaggttttgcaacatgttaaaattcctactcatttaacagatgtagtagtatatgaacaaacgtgggaggaggcgttaactagattaatttttgtgggaagtgattcaaaaggacgtagacaatacttttacggaaaaatgcatgtacagaatcgcaacgctaaaagagatcgtatttttgttagagtatataacgttatgaaacgaattaattgttttataaacaaaaatataaagaaatcgtccacagattccaattatcagttggcggtttttatgttaatggaaactatgttttttattagatttggtaaaatgaaatatcttaaggagaatgaaacagtagggttattaacactaaaaaataaacacatagaaataagtcccgatgaaatagttatcaagtttgtaggaaaggacaaagtttcacatgaatttgttgttcataagtctaatagactatataaaccgctattgaaactgacggatgattctagtcccgaagaatttctgttcaacaaactaagtgaacgaaaggtatacgaatgtatcaaacagtttggtattagaatcaaggatctccgaacgtatggagtcaattatacgtttttatataatttttggacaaatgtaaagtccatatctcctcttccgtcaccaaaaaagttaatagcattaactatcaaacaaactgctgaagtggtaggtcatactccatcaatttcaaaaagagcttatatggcaacgactattttagaaatggtaaaggataaaaattttttagatgtagtatctaaaactacgttcgatgaattcctatctatagtcgtagatcacgttaaatcatctacggatggatgatatagatctttacacaaataattacaagaccgataaatggaaatggataagcgtatgaaatctctcgcaatgacagctttcttcggagagctaagcacattagatattatggcattgataatgtctatatttaaacgccatccaaacaataccattttttcagtggataaggatggtcagtttatgattgatttcgaatacgataattataaggcttctcaatatttggatctgaccctcactccgatatctggagatgaatgcaagactcacgcatcgagtatagccgaacaattggcgtgtgcggatattattaaagaggatattagcgaatatatcaaaactactccccgtcttaaacgatttataaaaaaataccgcaatagatcagatactcgtatcagtcgagatacagaaaagcttaaaatagctctagctaaaggcatagattacgaatatataaaagacgcttgttaataagtaaatgaaaaaaaactagtcgtttataataaaacacgatatggatgccaacgtagtatcattttctactattgcgacgtatatagacgctttagcgaagaatgcttcggaattagaacagaggtctaccgcatacgaaataaataatgaattggaactagtatttattaagccgccattgattactttgacaaatgtagtgaatatctctacgattcaggaatcgtttattcgatttaccgttactaataaggaaggtgttaaaattagaactaagattccattatctaaggtacatggtctagatgtaaaaaatgtacagttagtagatgctatagataacatagtttgggaaaagaaatcattagtgacggaaaatcgtcttcacaaagaatgcttgttgagactatcgacagaggaacgtcatatatttttggattacaagaaatatggatcctctatccgactagaattagtcaatcttattcaagcaaaaacaaaaaactttacgatagactttaagctaaaatattttctaggatccggtgcccagtctaaaagttctttgttgcacgctattaatcatccaaagtcaaggcctaatacatctctggaaatagaattcacacctagagacaatgaaacagttccatatgatgaactaataaaggaattgacgactctctcgcgtcatatatttatggcttctccagagaatgtaattctttctccgcctattaacgcgcctataaaaacctttatgttgcctaaacaagatatagtaggtttggatctggaaaatctatatgccgtaactaagactgacggcattcctataactatcagagttacatcaaacgggttgtattgttattttacacatcttggttatattattagatatcctgttaagagaataatagattccgaagtagtagtctttggtgaggcagttaaggataagaactggaccgtatatctcattaagctaatagagcctgtgaatgcaatcaatgatagactagaagaaagtaagtatgttgaatctaaactagtggatatttgtgatcggatagtattcaagtcaaagaaatacgaaggtccgtttactacaactagtgaagtcgtcgatatgttatctacatatttaccaaagcaaccagaaggtgttattctgttctattcaaagggacctaaatctaacattgattttaaaattaaaaaggaaaatactatagaccaaactgcaaatgtagtatttaggtacatgtccagtgaaccaattatctttggagaatcgtctatctttgtagagtataagaaatttagcaacgataaaggctttcctaaagaatatggttctggtaagattgtgttatataacggcgttaattatctaaataatatctattgtttggaatatattaatacacataatgaagtgggtattaagtccgtggttgtacctattaagtttatagcagaattcttagttaatggagaaatacttaaacctagaattgataaaaccatgaaatatattaactcagaagattattatggaaatcaacataatatcatagtcgaacatttaagagatcaaagcatcaaaataggagatatctttaacgaggataaactatcggatgtgggacatcaatacgccaataatgataaatttagattaaatccagaagttagttattttacgaataaacgaactagaggaccgttgggaattttatcaaactacgtcaagactcttcttatttctatgtattgttccaaaacatttttagacgattccaacaaacgaaaggtattggcgattgattttggaaacggtgctgacctggaaaaatacttttatggagagattgcgttattggtagcgacggatccggatgctgatgctatagctagaggaaatgaaagatacaacaaattaaactctggaattaaaaccaagtactacaaatttgactacattcaggaaactattcgatccgatacatttgtctctagtgtcagagaagtattctattttggaaagtttaatatcatcgactggcagtttgctatccattattcttttcatccgagacattatgctaccgtcatgaataacttatccgaactaactgcttctggaggcaaggtattaatcactaccatggacggagacaaattatcaaaattaacagataaaaagacttttataattcataagaatttacctagtagcgaaaactatatgtctgtagaaaaaatagctgatgatagaatagtggtatataatccatcaacaatgtctactccaatgactgaatacattatcaaaaagaacgatatagtcagagtgtttaacgaatacggatttgttcttgtagataacgttgatttcgctacaattatagaacgaagtaaaaagtttattaatggcgcatctacaatggaagatagaccgtctacaaaaaactttttcgaactaaatagaggagccattaaatgtgaaggtttagatgtcgaagacttacttagttactatgttgtttatgtcttttctaagcggtaaataataatatggtatgggttctgatctcccagttctaaatgcattaaataattccaatagagcgatttttgttcctataggaccttccaactgtggatactctgtattgttaatagatatattaatacttttgtcgggtaacagaggttctacgtcttctaaaaataaaagttttataacatctggcctgttcataaataaaaacttggcgattctatatatactcttattatcaaatctagccattgtcttatagatgtgagctactgtaggtgtaccatttgattttctttctaatactatatatttctctcgaagaagttcttgcacatcatctgggaataaaatactactgttgagtaaatcagttattttttttatatcgatattgatggacatttttatagttaaggataataagtatcccaaagtcgataacgacgataacgaagtatttatacttttaggaaatcacaatgactttatcagattaaaattaacaaaattaaaggagcatgtatttttttctgaatatattgtgactccagatacatatggatctttatgcgtcgaattaaatgggtctagttttcagcacggcggtagatatatagaggtggaggaatttatagatgctggaagacaagttagatggtgttctacatccaatcatatatctaaagatatacccgaagatatgcacactgataaatttgtcatttatgatatttatacgtttgattcgttcaagaataaacgattggtattcgtacaggtacctccgtcgttaggagatgatagtcatttgactaatccgttattgtcaccgtattatcgtaattcagtagccagacaaatggtcaatgatatgatttttaatcaagattcatttttaaaatatttattagaacatctgattagaagccactatagagtttctaaacatataacaatagttagatacaaggataccgaagaattaaatctaacgagaatatgttataatagagataagtttaaggcgtttgtattcgcttggtttaacggcgtttcggaaaatgaaaaggtactagatacgtataaaaaggtatctaatttgatataatgaattcagtgactgtatcacacgcgccatatactattacttatcacgatgattgggaaccagtaatgagtcaattggtagagttttataacgaagtagccagttggctgctacgagacgagacgtcgcctattcctgataagttctttatacagttgaaacaaccgcttagaaataaacgagtatgtgtgtgtggtatagatccgtatccgaaagatggaactggtgtaccgttcgaatcaccaaattttacaaaaaaatcaattaaggagatagcttcatctatatctagattaaccggagtaattgattataaaggttataaccttaatataatagacggggttataccctggaattattacttaagttgtaaattaggagaaacaaaaagtcacgcgatttactgggataagatttccaagttactgctgcagcatataactaaacacgttagtgttctttattgtttgggtaaaacagatttctcgaatatacgggccaagttagaatccccggtaactaccatagtcggatatcatccagcggctagagaccgccaattcgagaaagatagatcatttgaaattatcaacgttttactggaattagacaacaaggcacctataaattgggctcaagggtttatttattaatgctttagtgaaattttaacttgtgttctaaatggatgcggctattagaggtaatgatgttatctttgttcttaagactataggtgtcccgtcagcgtgcagacaaaatgaagatccaagatttgtagaagcatttaaatgcgacgagttagaaagatatattgagaataatccagaatgtacactattcgaaagtcttagggatgaggaagcatactctatagtcagaattttcatggatgtagatttagacgcgtgtctagacgaaatagattatttaacggccattcaagattttattatcgaggtgtcaaactgtgtagctagattcgcgtttacagaatgcggcgccattcatgaaaatgtaataaaatccatgagatctaatttttcattgactaagtctacaaatagagataaaacaagttttcatattatctttttagatacgtataccactatggatacattgatagctatgaaacgaacactattagaattaagtagatcatctgaaaatccactaaccagatcgatagacactgccgtatataggagaaaaacaactcttcgggttgtaggtactaggaaaaatccaaattgcgacactattcatgtaatgcaaccaccgcatgataatatagaagattacctattcacttacgtggatatgaacaacaatagttattacttttctctacaacaacgattggaggatttagttcctgataagttatgggaaccagggtttatttcattcgaagacgctataaaaagagtttcaaaaatattcattaattctataataaactttaatgatctcgatgaaaataattttacaacggtaccactggtcatagattacgtaacaccttgtgcattatgtaaaaaacgatcgcataaacatccgcatcaactatcgttggaaaatggtgctattagaatttacaaaactggtaatccacatagttgtaaagttaaaattgttccgttggatggtaataaactgtttaatattgcacaaagaattttagacactaactctgttttattaaccgaacgaggagaccatatagtttggattaataattcatggaaatttaacagcgaagaacccttgataacaaaactaattttgtcaataagacatcaactacctaaggaatattcaagcgaattactctgtccaagaaaacgaaagactgtagaagctaacatacgagacatgttagtagattcagtggagaccgatacctatccggataaacttccgtttaaaaatggtgtattggacctggtagacggaatgttttactctggagatgatgctaaaaaatatacgtgtactgtatcaaccggatttaaatttgacgatacaaagttcgtcgaagacagtccagaaatggaagagttaatgaatatcattaacgatatccaaccattaacggatgaaaataagaaaaatagagagctatatgaaaaaacattatctagttgtttatgcggtgctaccaaaggatgtttaacattcttttttggagaaactgcaactggaaagtcgacaaccaaacgtttgttaaagtctgctatcggtgacctgtttgttgagacgggtcaaacaattttaacagatgtattggataaaggacctaatccatttatcgctaacatgcatttgaaaagatctgtattctgtagcgaactacctgattttgcctgtagtggatcaaagaaaattagatctgacaatattaaaaagttgacagaaccttgtgtcattggaagaccgtgtttctccaataaaattaataatagaaaccatgcgacaatcattatcgatactaattacaaacctgtttttgataggatagataacgcattaatgagaagaattgccgtcgtgcgattcagaacacacttttctcaaccttctggtagagaggctgctgaaaataatgacgcgtacgataaagtcaaactattagacgaggggttagatggtaaaatacaaaataatatatatagatttgcatttctatacttgttggtgaaatggtacaaaaaatatcatgttcctattatgaaactatatcctacacccgaagagattcctgactttgcattctatctcaaaataggtactctgttggtatctagctctgtaaagcatattccattaatgacggacctctccaaaaagggatatatattgtacgataatgtggtcactcttccgttgactactttccaacagaaaatatccaagtattttaattctagactatttggacacgatatagagagcttcatcaatagacataagaaatttgccaatgttagtgatgaatatctgcaatatatattcatagaggatatttcatctccgtaaatatatgctcatatatttatagaagatatcacatatctaaatgaataccggaatcatagatttatttgataatcatgttgatagtataccaactatattacctcatcagttagctactctagattatctagttagaactatcatagatgagaacagaagcgtgttattgttccatattatgggatcaggtaaaacaataatcgctttgttgttcgccttggtagcttccagatttaaaaaggtttacattctagtgccgaacatcaacatcttaaaaattttcaattataatatgggtgtagctatgaacttgtttaatgacgaattcatagctgagaatatctttattcattccacaacaagtttttattctcttaattataacgataacgtcattaattataacggattatctcgctacaataactctatttttatcgttgatgaggcacataatatctttgggaataatactggagaacttatgaccgtgataaaaaataaaaacaagattccttttttactattgtctggatctcccattactaacacacctaatactctgggtcatattatagatttaatgtccgaagagacgatagattttggtgaaattattagtcgtggtaagaaagtaattcagacacttcttaacgaacgcggtgtgaatgtacttaaggatttgcttaaaggaagaatatcatattacgaaatgcctgataaagatctaccaacgataagatatcacggacgtaagtttctagatactagagtagtatattgtcacatgtctaaacttcaagagagagattatatgattactagacgacagctatgttatcatgaaatgtttgataaaaatatgtataacgtgtcaatggcagtattgggacaacttaatctgatgaataatttagatactttatttcaggaacaggataaggaattgtacccaaatctgaaaataaataatggcgtgttatacggagaagaattggtaacgttaaacattagttccaaatttaaatactttattaatcggatacagacactcaacggaaaacattttatatacttttctaattctacatatggcggattggtaattaaatatatcatgctcagtaatggatattctgaatataatggttctcagggaactaatccacatatgataaacggcaaaccaaaaacatttgctatcgttactagtaaaatgaaatcgtctttagaggatctattagatgtgtataattctcctgaaaacgatgatggtagtcaattgatgtttttgttttcatcaaacattatgtccgaatcctatactctaaaagaggtaaggcatatttggtttatgactatcccagatactttttctcaatacaaccaaattcttggacgatctattagaaaattctcttacgccgatatttctgaaccagttaatgtatatcttttagccgccgtatattccgatttcaatgacgaagtgacgtcattaaacgattacacacaggatgaattaattaatgttttaccatttgacatcaaaaagctgttgtatctaaaatttaagacgaaagaaacgaatagaatatactctattcttcaagagatgtctgaaacgtattctcttccaccacatccatcaattgtaaaagttttattgggagaattggtcagacaatttttttataataattctcgtattaagtataacgataccaagttacttaaaatggttacatcagttataaaaaataaagaagacgctaggaattacatagatgatattgtaaacggtcacttctttgtatcgaataaagtatttgataaatctcttttatacaaatacgaaaacgatattattacagtaccgtttagactttcctacgaaccatttgtttggggagttaactttcgtaaagaatataacgtggtatcttctccataaaactgatgagatatataaagaaataaatgtcgagctttgttaccaatggatacctttccgttacattggaaccacacgagctgacgttagacataaaaactaatattaggaatgccgtatataagacgtatctccatagagaaattagtggtaaaatggccaagaaaatagaaattcgtgaagacgtggaattacctctcggcgaaatagttaataattctgtagttataaacgttccgtgtgtaataacctacgcgtattatcacgttggggatatagtcagaggaacattaaacatcgaagatgaatcaaatgtaactattcaatgtggagatttaatctgtaaactaagtagagattcgggtactgtatcatttagcgattcaaagtactgcttttttcgaaatggtaatgcgtatgacaatggcagcgaagtcactgccgttctaatggaggctcaacaaggtatcgaatctagttttgtttttctcgcgaatatcgtcgactcataaaaaagagaatagcggtaagtataaacacgaatactatggcaataattgcgaatgttttattctcttcgatatatttttgataatatgaaaaacatgtctctctcaaatcggacaaccatctcataaaatagttctcgcgcgctggagaggtagttgccgctcgtataatctctccagaataatatacttgcgtgtcgtcgttcaatttatacggatttctatagttctctgttatataatgcggtttgccctcatgattagacgacgacaatagtgttctaaatttagatagttgatcagaatgaatgtttattggcgttggaaaaattatccatacagcgtctgcagagtggttgatagttgttcctagatatgtaaaataatccaacttactaggcagcaaattgtctagataaaatactgaatcaaacggtgcagacgtattggcggatctaatggaatccaattgattaactatcttttgaaaatatacatttttatgatccaatacttgtaagaatatagaaataatgataagtccatcatcgtgtttttttgcctcttcataagaactatattttttcttattccaatgaacaagattaatctctccagagtatttgtacacatctatcaagtgattggatccataatcgtcttcctttccccaatatatatgtagtgatgataacacatattcattggggagaaaccctccacttatatatcctcctttaaaattaatccttactagttttccagtgttctggatagtggttggtttcgactcattataatgtatgtctaacggcttcaatcgcgcgttagaaattgcttttttagtttctatattaataggagatagttgttgcggcatagtaaaaatgaaatgataactgtttaaaaatagctcttagtatgggaattacaatggatgaggaagtgatatttgaaactcctagagaattaatatctattaaacgaataaaagatattccaagatcaaaagacacgcatgtgtttgctgcgtgtataacaagtgacggatatccgttaataggagctagaagaacttcattcgcgttccaggcgatattatctcaacaaaattcagattctatctttagagtatccactaaactattacggtttatgtactacaatgaactaagagaaatctttagacggttgagaaaaggttctatcaacaatatcgatcctcactttgaagagttaatattattgggtggtaaactagataaaaaggaatctattaaagattgtttaagaagagaattaaaagaggaaagtgatgaacgtataacagtaaaagaatttggaaatgtaattctaaaacttacaacacgggataaattatttaataaagtatatataagttattgcatggcgtgttttattaatcaatcgttggaggatttatcgcatactagtatttacaatgtagaaattagaaagattaaatcattaaatgattgtattaacgacgataaatacgaatatctgtcttatatttataatatgctagttaatagtaaatgaacttttacagatctagtataattagtcagattattaagtataatagacgactagctaagtctattatttgcgaggatgactctcaaattattacactcacggcattcgttaaccaatgcctatggtgtcataaacgagtatccgtgtccgctattttattaactactgataacaaaatattagtatgtaacagacgagatagttttctctattctgaaataattagaactagaaacatgtttagaaagaaacgattatttctgaattattccaattatttgaacaaacaggaaagaagtatactatcgtcatttttttctctagatccagctactactgataatgatagaatagacgctatttatccgggtggcatacccaaaaggggtgagaatgttccagagtgtttatccagggaaattaaagaagaagttaatatagacaattcttttgtattcatagacactcggttttttattcatggcatcatagaagataccattattaataaattttttgaggtaatcttctttgtcggaagaatatctctaacgagtgatcaaatcattgatacatttaaaagtaatcatgaaatcaaggatctaatatttttagatccgaattcaggtaatggactccaatacgaaattgcaaaatatgctctagatactgcaaaacttaaatgttacggccatagaggatgttattatgaatcattaaaaaaattaactgaggatgattgattaaaaaatataaattaatttaccatcgtgtatttttataacgggattgtccggcatatcatgtagatagttaccgtctacatcgtatactcgaccatctacgcctttaaatcctctatttattgacattaatctattagaattggaataccaaatattagtaccctcaattagtttattggtaatattttttttagacgatagatcgatggctcttgaaaccaaggttttccaaccggactcattgtcgatcggtgagaagtctttttcattagcatgaatccattctaatgatgtatgtttaaacactctaaacaattggacaaattcttttgatttgctttgaatgatttcaaataggtcttcgtctacagtaggcataccattagataatctagccattataaagtgcacgtttacatatctacgttctggaggagtaagaacgtgactattgagacgaatggctcttcctactatctgacgaagagacgcctcgttccatgtcatatctaaaatgaagatatcattaattgagaaaaaactaataccctcgcctccactagaagagaatacgcatgttttaatgcattctccgttagtgtttgattcttggttaaactcagccaccgccttgattctagtatcttttgttctagatgagaactctatattagagataccaaagactttgaaatatagtaataagatttctattcctgactgattaacaaatggttcaaagactagacatttaccatgggatgctaatattcccaaacatacatctataaatttgacgcttttctcttttaattcagtaaatagagagatatcagccgcactagcatcccctttcaatagttctccctttttaaaggtatctaatgcggatttagaaaactctctatctcttaatgaatttttaaaatcattatatagtgttgctatctcttgcgcgtattcgcccggatcacgattttgtctttcaggaaagctatcgaacgtaaacgtagtagccatacgtctcagaattctaaatgatgatatacctgtttttatttcagcgagtttagccttttgataaatttcttcttgctttttcgacatattaacgtatcgcattaatactgttttcttagcgaatgatgcagacccttctacgtcatcaaaaatagaaaactcgttattaactatatacgaacatagtcctcctagtttggagactaattctttttcatcgactagacgtttattctcaaatagcgattggtgttgtaaggatcctggtcgtagtaagttaaccaacatggtgaattcttgcacactattgacgataggtgtagccgataaacaaatcatcttatggttttttaacgcaatggtcttagataaaaaattatatactgaacgagtaggacggatcttaccatcttctttgattaatgatttagaaatgaagttatgacattcatcaataatgacgcatattctactcttggaattaatagttttgatattagtaaaaaatttatttctaaaattttgatcatcgtaattaataaaaatacaatccttcgttatctctggagcgtatctgagtatagtgttcatccaaggatcttctatcaaagcctttttcaccaataagataatagcccaattcgtataaatatccttaagatgtttgagaatatatacagtagtcattgttttaccgacacccgtttcatggaacaataaaagagaatgcatactgtctaatcctaagaaaactcttgctacaaaatgttgataatccttgaggcgtactacgtccgaccccatcatttcaacgggcatattagtagttctgcgtaaggcataatcgatataggccgcgtgtgatttactcatttatgagtgataagtaataactatgttttaaaaatcacagcagtagtttaactagtcttctctgatgtttgttttcgatactttttgaatcagaagtcatactagaataaagcaacgagtgaacgtaatagagagcttcgtatactctattcgaaaactctaagaacttattaatgaattccgtatccactggattgtttaaaatactaaattgaacactgttcacatccttccaagaagaagacttagtgacggacttaacatgagacataaataaatccaaattttttttacaaacatcactagccaccataatggcgctatctttcaaccagctatcgcttacgcattttagcagtctaacatttttaaagagactacaatatattctcatagtatcgattacacctctaccgaataaagttggaagtttaataatacaatatttttcgtttacaaaatcaaataatggtcgaaacacgtcgaaggttaacatcttataatcgctaatgtatagattgttttcagtgagatgattattagatttaatagcatctcgttcacgtttgaacagtttattgcgtgcgctgaggtcggcaactacggcgtccgctttagtactcctcccataatactttacgctattaatctttaaaatttcatagactttatctagatcgctttctggtaacatgatatcatgtgtaaaaagttttaacatgtcggtcggcattctatttagatcattaactctagaaatctgaagaaagtaattagctccgtattccagactaggtaatgggcttttacctagagacagattaagttctggcaatgtttcataaaatggaagaaggacatgcgttccctcccggatattttttacaatttcatccatttacaactctatagtttgttttcattattattagttattatctcccataatcttggtaatacttaccccttgatcgtaagataccttatacaggtcattacatacaactaccaattgtttttgtacataatagattggatggttgacatccatggtggaataaactactcgaacagatagtttatctttccccctagatacattagccgtaatagttgtcggcctaaagaatatctttggtgtaaagttaaaagttagggttcttgttccattattgctttttgtcagtagttcattataaattctcgagatgggtccgttctctgaatatagaacatcatttccaaatctaacttctagtctagaaataatatcggtcttattcttaaaatctattcccttgatgaagggatcgttaatgaacaaatccttggcctttgattcggctgatctattatctccgttatagacgttacgttgactagtccaaagacttacaggaatagatgtatcgatgatgttgatactatgtgatatgtgagcaaagattgttctcttagtggcatcactatatgttccagtaatggcggaaaactttttagaaatgttatatataaaagaattttttcgtgttccaaacattagcagattagtatgaagataaacactcatattatcaggaacattatcaatttttacatacacatcagcatcttgaatagaaacgataccatcttctggaacctctacgatctcggcagactccggataaccagtcggtgggccatcgctaacaataactagatcatccaacaatctactcacatatgcatctatataatctttttcatcttgtgagtaccctggatacgaaataaatttattatccgtatttccataataaggtttagtataaacagagagagatgttgccgcatgaacttcagttacagtcgccgttggttggtttatttgacctattactctcctaggtttctctataaacgatggtttaatttgtacattcttaaccatatatccaataaagctcaattcaggaacataaacaaattctttgttgaacgtttcaaagtcgaacgaagagtcacgaataacgatatcggatactggattgaaggttaccgttacggtaatttttgaatcggatagtttaagactgctgaatgtatcttccacatcaaacggagttttaatataaacgtatactgtagatggttctttaatagtgtcattaggagttaggccaatagaaatatcattaagttcactagaatatccagagtgtttcaaagcaattgtattattgatacaattattatataattcttcgccctcaatttcccaaataacaccgttacacgaagagatagatacgtgattaatacatttatatccaacatatggtacgtaactgaatcttcccatacctttaacttctggaagttccaaactcagaaccaaatgattaagcgcagtaatatactgatccctaatttcgaagctagcgatagcctgattgtctggaccatcgtttgtcataactccggatagagaaatatattgcggcatatacaaagttggaatttgactatcgactgcgaagacattagaccgtttaatagagtcatccccaccgatcaaagaattaatgatagtattattcattttctatttaaaatggaaaaagcttacaataaactccgtagagaaatatctataatttgtgagttttccttaaagtaacagcttccgtaaacgccgtctttatctcttagtaggtttattgtatttatgaccttttccttatcttcatagaatactaaaggcaacaaagaaatttttggttcttctctaagagctacgtgagacttaaccatagaagccaacgaatccctacatattttagaacagaaataccctacttcaccacccttgtatgtctcaatactaataggtctaaaaaccaaatcttgattacaaaaccaacacttatcaattacactatttgtcttaatagacacatctgccatagatttataatactttggtagtatacaagcgagtgcttcttctttagcgggcttaaagactgctttaggtgctgaaataaccacatctggaaggcttactcgcttagccatttaattacggaactatttttttatacttctaatgagcaagtagaaaacctctcatctacaaaaacgtactcgtgtccataatcctctaccatagttacacgttttttagatctcatatgtgctaaaaagttttcccatactaattggttactattatttttcgtataatttttaacagtttgaggttttagatttttagttacagaagtgatatcgaatattttatccaaaaagaatgaataattaattgtcttagaaggagtgttttcttggcaaaagaataccaagtgcttaaatatttctactacttcattaatcttttctgtactcagattcagtttctcatcttttacttgattgattatttcaaagactaacttataatcctttttatttattctctcgttagccttaagaaaactagatacaaaatttgcatctacatcatccgtggatatttgatttttttccatgatatccaagagttccgagataatttctccagaacattgatgagacaataatctccgcaatacatttctcaaatgaataagtttattagacacgtggaagtttgactttttttgtacctttgtacatttttgaaataccgactcgcaaaaaatacaatattcatatccttgttcagatactataccgttatgtctacaaccgctacataatcgtagattcatgttaacactctacgtatctcgtcgtccaatattttatataaaaacattttatttctagacgttgccagaaaatcctgtaatatttttagttttttgggctgtgaataaagtatcgccctaatattgttaccgtcttccgccaatatagtagttaaattatccgcacatgcagaagaacaccgcttaggcggattcagtacaatgttatatttttcgtaccaactcatttaaatatcataatctaaaatagttctgtaatatgtctagcgctaatatattgatcataatcctgtgcataaattaagatacaacaatgtctcgaaatcatcgacatggcttcttccatagttagaagatcgtcgtcaaagttagcaacgtgattcatcaacatttgctgttttgaggcagcaaatactgaaccgtcgccattcaaccattcataaaaaccatcgtctgaatccattgataatttcttgtactggtttttgagagctcgcatcaatctagcatttctagctcccggattgaaaacagaaagaggatcgtacatccagggtccattttctgtaaatagaatcgtataatgtcccttcaagaagatatcagacgatccacaatcaaagaattggtctccgagtttgtaacaaactgcggactttaacctatacatgataccgtttagcataatttctggtgatacgtcaatcggagtatcatctattagagatctaaagccggtgtaacattctccaccaaacatattcttattctgacgtcgttctacataaaacatcattgctccattaacgataacaggggaatgaacagcactacccatcacattagttcccaatggatcaatgtgtgtaactccagaacatcttccatagcctatgttaggaggagcgaacaccactcttccactattgccatcgaatgccatagaataaatatccttggaattgatagaaatcggactgtcggatgttgtgatcatcttcataggattaacaactatgtatggtgccgcctgaagtttcatatcgtaactgatgccgtttataggtctagccacagaaaccaacgtaggtctaaatccaactatagacaaaatagaagccaatatctgttcctcatctgtcataacttgagagcatccagtatgaataatcttcattagatggggatctaccgcatcatcatcgttacaataaaaaattcccattctaatgttcataattgcttttctaatcatggtatgcatgtttgctctctgaatctctgtggaaattagatctgatacacctgtaatcactatcggattatcctccgtaagacgattaaccaacaacatataattataagactttacttttctaaattcataaagttgctggattaggctataggtgtctccatgtacatacgcgttctcgagcgcaggaagtttaataccgaatagtgccatcagaataggatgaatatagtaattagtttctggttttctataaataaaagacaaatcttgtgaactagacatatcggtaaaatgcatggattggaatcgtgtagtcgacagaagaatatgatgattagatggagagtatattttatctaactctttgagttggtcaccgattctaggactagctcgagaatgaataagtactaaaggatgagtacatttcacagaaacactagcattgttcaatgtgctctttacatgggtaaggagttgaaatagctcgtttctatttgttctgacaatatttagtttattcataatgttaagcatatcctgaatagtaaagttagatgtgtcatacttgttagtagttagatatttagcaattgcattcccatcatttctcaatctcgtactccaatcatgcgtggatgctacttcgtcgatggaaaccatacaatcctttttgataggctgttgagattgatcatttcctgcacgtttaggtttggtacgttgatttctagcccctgcggatataaagtcatcgtctacaatttgggacaatgaattgcatacactacaagacaaagatttatcagaagtgtgaatatgatcttcatctaccaaagaaagagtttgattagtataactagattttagtcctgcgttagatgttaaaaaaacatcgctattgaccacggcttccattatttatattcgtagtttttactcgaaagcgtgattttaatatccaatcttattacttttggaatcgttcaaaacctttgactagttgtagaatttgatctattgccctacgcgtatactcccttgcatcatatacgttcgtcaccagatcgtttgtttcggcctgaagttggtgcatatctctttcaacattcgacatgagatccttaagggccatatcgtctagattttgttgagatgctgctcctggatttggattttgttgtgctgttgtacatactgtaccaccagtaggtgtaggagtacatacagtggccacaataggaggttgagaaagtgtaaccgttggagtagtacaagaaatacttccatccgattgttgtgtacatgtagttgttggtaacgtctgagaaggttgggtagatggcggcgtcgtcgttttttgatctttattaaatttagagataatatcctgaacagcattgctcggcgtcaacgctggaaggagtgaactcgccggcgcatcagtatcttcagacagccaatcaaaaagattagacatatcagatgatgtattagtttgttgtcgtggttttggtgtaggagcagtactactaggtagaagaataggagccgatgtagctgttggaaccggctgtggagttatatgaatagttggttgtagcggttggataggctgtctgctggcggccatcatattatctctagctagttgttctcgcaactgtctttgataatacgactcttgagactttagtcctatttcaatcgcttcatcctttttcgtatccggatccttttcttcagaataatagattgacgactttggtgtagaggattctgccagcctctgtgagaacttgttaaagaagtccatttaaggctttaaaattgaattgcgattataagattaaatggcagacacagacgatattatcgactatgaatccgatgatctcaccgaatacgaggatgatgaagaagaggaagaagatggagagtcactagaaactagtgatatagatcccaaatcttcttataagattgtagaatcagcatccactcatatagaagatgcgcattccaatcttaaacatatagggaatcatatatctgctcttaaacgacgctatactagacgtataagtctatttgaaatagcgggtataatagcagaaagctataacttgcttcaacgaggaagattacctctagtttcagaattttctgacgaaacgatgaagcaaaatatgctacatgtaattatacaagagatagaggagggttcttgtcctatagtcatcgaaaagaacggagaattgttgtcggtaaacgattttgacaaagatggtctaaaattccatctagactatattatcaaaatttggaaacttcaaaaacgatattagaatttatacgaatatcgttctctaaatgtcacaatcaagtctcgcatgttcagcaatttattgtcgtactttatatcgtgttcattaacgatatcttgcaaaatagtaatgattctatcttccttcgatagatattcttcagagattattgtcttatattctttcttgttatcagatatgaatttgataagactttgaacattattgatacccgtctgtttaattttttctacagatattttagttttggcagattctatcgtatctgtcaatagacatccaacatcgacattcgacgtcaattgtctataaatcaacgtataaattttagaaataacattagcgaattgttgtgcgttgatgtcgttattctgaaacagtatgattttaggtagcattttcttaacaaagagaacgtatttattgttactcagttgaacagatgatatatccagattactaacgcatctgattccgtataccaaactttcagaagaaatggtatacaattgtttgtattcattcaatgtctctttttcagaaattagtttagagtcgaatactgcaataattttcaagagatagttttcatcagataagattttatttagtgtagatatgataaaactattgttttgttggagaacttgatacgccgcgttctctgtagtcgacgctctcaaatgggaaacaatctccattatttttttggaatcggatactatatcttcggtatcttgacgcagtctagtatacatagagttaagagagattagagtttgtacattaagcaacatgtctctaaatgtggctacaaacttttcctttttcacatcatctagtttattatataccgatttcacaacggcaccagatttaaggaaccagaatgaaaaactctgataactacaatatttcatcatagttacgattttatcatcttctatagttggtgtaatagcgcatacctttttctccaagactggaaccaacgtcataaaaatgtttaaatcaaaatccatatcaacatctgatgcgctaagaccagtctcgcgttcaagattatctttactaatggtgacgaactcatcgtataaaactctaagtttgtccattatttatttacagatttagttgtttaatttatttgtgctcttccagagttgggatagtatttttctaacgtcggtattatattattaggatctacgttcatatgtatcataatattaatcatccacgttttgataaatctatctttagcttctgaaataacgtatttaaacaaaggagaaaaatatttagctacggcatcagacgcaataacattttttgtaaatgtaacgtatttagacgacagatcttcgttaaaaagttttccatctatgtagaatccatcggttgttaacaccattcccgcgtcagattgaataggagtttgaatagtttgttttggaaatagatccttcaataacttatagttgggtgggaaaaaatcgattttatcactagactctttcttttttactatcattacctcatgaactatttcttgaatgagtatatgtattttctttcctatatcggacgcgttcattggaaaatataccatgtcgttaactataagaatatttttatcctcgtttacaaactgaataatatcagatgtagttcgtaaacgaactatatcatcaccagcacaacatctaactatatgatatccactagtttcctttagccgtttattatcttgttccatattagcagtcattccatcatttaagaaggcgtcaaaaataatagggagaaatgacattttggattctgttacaactttaccaaaattaaggatatacggacttactatctttttctcaacgtcaatttgatgaacacacgatgaaaatgtgcttctatgagattgatcatgtagaaaacaacaagggatacaatatttccgcatatcatgaaatatattaagaaatcccaccttattatatttccccaaaggatccatgcacgtaaacattatgccgttatcattaataaagacttctttctcatcggatctgtaaaagttgttactgatttttttcattccaggatctagataattaataatgatgggttttctattcttattctttgtattttggcatatcctagaccagtaaacagtttccactttggtaaaatcagcagacttttgaacgctattaaacatggcattaatggcaataactaaaaatgtaaaatatttttctatgttaggaatatggtttttcactttaatagatatatggtttttggccaaaatgatagatatttttttatccgaggatagtaaaatattattagtcgccgtctctataaaaatgaagctagtctcgatatccaattttattctagaattgataggagtcgccaaatgtaccttatacgttatatctcccttgatgcgttccatttgtgtatctatatcggacacaagatctgtaaatagttttacgttattaatcatcacggtatcgccgtcgctagataacgctaatgtaccatccaagtcccaaatggagagatttaactgttcatcgtttagaataaaatgattaccggtcatattaataaagtgttcatcgtatctagataacaacgacttataattaatgtccaagtcttgaactcgctgaatgatcttttttaacccagttagttttagattggtacgaaatatattgttaaactttgattctacagtaatgtccaaatctagttgtggaaatacttccatcaacattgtttcaaacttgataatattattatctacatcttcgtacgatccaaattccggaatagatgtatcgcacgctctggccacccagataaccaaaaagtcacacgctccaggatatacattgtataaaaagctatcgttttttagtagggtttttttctgcgtgtatacgaagggattaaaaatagtattatcaacgtaactatattccaaattattcttatgagaatagataataatatcgtccttaatatctaacaaatttcctaaatatccctttaattgagtcattcgaagcgtcaatagaatatgtctcttaactatttccggctgttgtatatttaaatgacttcgtaaaaaataatatatgggcgacttctcatctatgtaatcatatggagtgagatatagggctcgttctacctcctgccccttacccacctgtaataccaattgcggacttactatatatcgcatatttatatcgtggggtaaagtgaaaatctactaccgatgatgtaagtcttacaatgttcgaaccagtaccagatcttaatttggaggcctccgtagaactaggggaggtaaatatagatcaaacaacacctatgataaaggagaatagcggttttatatcccgcagtagacgtctattcgcccatagatctaaggatgatgagagaaaactagcactacgattctttttacaaagactttattttttagatcatagagagattcattatttgttcagatgcgttgacgctgtaaaagacgtcactattaccaaaaaaaataacattatcgtggcgccttatatagcacttttaactatcgcatcaaaaggatgcaaacttacagaaacaatgattgaagcattctttccagaactatataatgaacatagtaagaaatttaaattcaactctcaagtatccatcatccaagaaaaactcggataccagtttggaaactatcacgtttatgattttgaaccgtattactctacagtagctctggctattcgagatgaacattcatctggcatttttaatatccgtcaagagagttatctggtaagttcattatctgaaataacatatagattttatctaattaatctaaaatctgatcttgttcaatggagtgctagtacgggcgctgtaattaatcaaatggtaaatactgtattgattacagtgtatgaaaagttacaactggtcatagaaaatgattcacaatttacatgttcattggctgtggaatcaaaacttccaataaaattacttaaagatagaaatgaattatttacaaaattcattaacgagttaaaaaagaccagttcattcaagataagcaaacgcgataaggatacgctactaaaatattttacttaggactggagttagaatttatagacgactcatttcgtttatcattgttactattattactattactatcattattagtgttggcattattagtattcttcttgtcatcttgttcagaaatatacagcaatgctatacctaatactaaatacattatcatgctcgcaatggctctaacaacaacgaaccaaaatgaatttggtcgtagcttttgttcacaaaaatacataaagaaatgtctacataaatctatggcgccattggctacttgaaatagcgccagtcctcctacagattttaatatagctgtataacatgacatttattcatcatcaaaagagacagagtcaccatctgtcatatttagattttttttcatgtgttcaaagtatcctctactcatttcattataatagtttatcatacttagaattttaggacggatcaatgagtaagacttgactagatcgtcagtagtaatttgtgcatcgtctattctgcatccgcttcgtcgaataatgtatagcatcgctttgagattctccatagctatcaagtctttatacaatgacatggaaatatctgtgaatactttatacttctccaacatcgatgccttaacatcatcgcctactttagcattgaaaatacgttctattgtgtagatggatgtagcaagatttttaaacaacaatgccatcttacacgatgattgcctcaagtctccaatcgtttgtttagaacgattagctacagagtccaatgcttggctgactagcatattattatctttagaaattgtattcttcaatgaggcgtttatcatatctgtgatttcgttagtcatattacagtctgactgggttgtaatgttatccaacatatcacctatggatacggtacacgtaccagcatttgtaataatcctatctaagatgttgtatggcattgcgcagaaaatatcttctcctgtaatatctccactctcgataaatctactcagattattcttaaatgccttattctctggagaaaagatatcagtgtccatcatttcattaatagtatacgcagaaaagataccacgagtatcaattctatccaagatacttatcggttccgagtcacagataatggtttcctctccttcgggagatcctgcatagaaatatctaggacaatagtttctatactgtctgtaactctgataatctctaaagtcactaactgataccatgaaattgagaagatcaaacgctgaagtaattaatttttctgcctcgtttttactacaactagttttcatcaatgtagtgacgatgtattgtttagttacttttggtctaatactgatgatagagatattattgcttcccataatggatcttctagtagtcaccttaaagcccattgatgcgaatagcagatagataaagtcttggtatgactcctttctaatatagtacggactacctttgtcacccaactttatacccacataagccataacaacctctttaatagccgtttcatgaggtttatcagccatgagcctgagtagttggaagaatctcatgaatcccgtctcagaaagtcctatatgcatgatagatttatctttcctgggaaactctcgtatagtcatagatgaaatactctttaaagtttctgaaataagattagtaacagtcttacctccgactactctaggtaacaaacaaactctaataggtgttttctctgcggagataatatcagaaaggatagagcaataagtagtattattgtgattataaagaccgaatacataacaggtagaatttataaacatcatgtcctgaaggtttttagacttgtattcctcgtaatccataccgtcccaaaacatggatttggtaactttgatagccgtagatctttgttccttcgccaacaggttaaagaaattaataaagaatttgttgtttctatttatgtccacaaattgcacgtttggaagcgccacggttacattcactgcagcattttgaggatcgcgagtatgaagtacgatgttattgtttactggtatatctggaaagaaatctaccagtctaggaataagagattgatatcgcatagaaatagtaaagtttataatctcatcatcgaagagcattttgttaccattgtaataaatatccactctgtcatatgtataaatgaagtactgttcaaacatgatgagatgtttatatgttggcatagtagtgagatcgacgtttggtaatggcaatgtattaagattaactccataatgtctagcagcatctgcgatgttataagcgtcgtcaaagcggggtcgatcttgtattgttatatattgtctaacacctataagattatcaaaatcttgtctgcttaatacaccgttaacaatttttgccttgaattcttttattggtgcattaataacatccttatagaggatgttaaacaaataagtgttatcaaagttaagatctggatatttcttttctgctagaacatccattgagtcggagccatctggtttaatataaccaccgataaatctagctctgtattctgtatccgtcaatctaatattaagaaggtgttgagtgaaaggtggaagatcgtaaaagctgtgagtattaatgataggattagtttccgaactaatgttaattggggtattaataatatctatatttccagcgttaagtgtaacattaaacagttttaattcacgtgacgtggtatcaattaaataattaatgcccaatttggatatagcagcctgaagctcatcttgtttagttacggatcctaatgagttattaagcaatatatcgaacggatgaacgaaggttgttttaagttggtcacatactttgtaatctagacatagatgcggaagaacggtagaaactatacgaaataaatattcagagtcctctaattgatcaagagtaactattgacttaataggcatcatttatttagtattaaatgacgaccgtaccagtgacggatatacaaaacgatttaattacagagttttcagaagataattatccatctaacaaaaattatgaaataactcttcgtcaaatgtctattctaactcacgttaacaacgtggtagatagagaacataatgccgccgtagtgtcatctccagaggaaatatcctcacaacttaatgaagatctatttccagatgatgattcaccggccactattatcgaacgagtacaacctcatactactattattgacgatactccacctcctacgtttcgtagagagttattaatatcggaacaacgtcaacaacgagaaaaaagatttaatattacagtatcgaaaaatgctgaagcaataatggaatctagatctatgataacttctatgccaacacaaacaccatccttgggagtagtttatgataaagataaaagaattcagatgttagaggatgaagtggttaatcttagaaatcaacgatctaatacaaaatcatctgataatttagataattttaccaaaatactatttggtaagactccgtacaaatcaacagaagttaataagcgtatagccatcgttaattatgcaaatttgaacgggtcccccttatcagtcgaggacttggatgtttgttcggaggatgaaatagatagaatctataaaacgattaaacaatatcacgaaagtagaaaacgaaaaattatcgtcactaacgtgattattattgtcataaacattatcgagcaggcattgctaaaactcggatttgaagaaatcaaaggactgagtaccgatatcacttcagaaattatcgatgtggagatcggagatgactgcgatgctgtagcatctaaactaggaatcggtaacagtccggttcttaatattgtattgtttatactcaagatattcgttaaacgaattaaaattatttaatttaatacattcccatatccagacaacaatcgtctggattaatctgttcctgtcgtctcataccggacgacatattaatctttttattagtgggcatctttttagatggtttctttttcccagcattaactgagtcgatacctagaagatcgtgattgatctctccgaccattccacgaacttctaattggccgtctctgacggtaccataaactattttaccagcattagtaacagcttggacaatctgaccatccatcgcattgtacgatgtagtagtaactgttgttctacgtctaggagcaccagaagtatttttggagcccttggatgttgatgtagaagaagacgaggattttgattttggtttacatgtaatacattttgaactctttgattttgtatcacatgcgccggcagtcacatctgtttgagaattaagattattgttgcctcctttgacggctgcatctccaccgatttgcgctagtagatttttaagctgtggtgtaatcttattaactgtttcgatataatcatcgtaactgcttctaacggctaaattttttttatccgccatttagaagctaaaaatatttttatttatgcagaagatttaactagattatacaatgaactaatatgatccttttccagattatttacaaacttggtattttttggttctggaggaggcgaatttaaattcggacttggattcggattttgtaagttcttgatcttattatacatcgagtataggatggcgacagtaactgctacacaaataccgatcaaaagaagaataccaatcatttattgacaataacttcactattgatcaagtatgcaatatatcatcttttcactaaataagtagtaataatgattcaacaatgtcgagatatatggacgataataatttagttcatggaaatatcgctatgattggtgtgaatgactccgctaactctgtggggtgcgcagtgctttccccacatagaataaattagcattccgactgtgataataataccaagtataaacgccataatactcaatactttccatgtacgagtgggactggtagacttactaaagtcaataaaggcgaagatacacgaaagaatcaaaagaatgattccagcgattagcacgccggaaaaataatttccaatcataagcatcatgtccatttaactaataaaaattttaaatcgccgaatgaacaaagtggaatataaaccatataaaaacaatagtttgtactgcaaaaataatatctatttttgttttcgaagatatggtaaaattaaatagtagtacacagcatgttataactaacagcagcaacggctcgtaattacttatcatttactagacgaaaaggtggtgggatattttcttgctcaaataatacgaatatatcacccatccattttatgcgatgtttatatactctaatctttaatagatctatagacgacgggtttaccaacaatatagattttatcgattcatctaatttaaacccttccttaaacgtgaatgatctattatctggcataacgatgaccctacctgatgaatcggacaatgtactgggccatgtagaataaattatcaacgaattatcgtctacgaacatttatatcatttgttttaattttaggacgcgaataaatggatataaaatagaaaataacagatattacaaccagtgttatggccgcgcccaaccaggtaggcagttttattttatcttttactacaggttctcctggatgtacgtcaccaacggcggacgtagttctagtacaattagacgtaagttccgcttgggaattttttaacgctaaagagttaacgttaatcgtgcacccaacgtatttacatctagttcgttgaacatcttgattataatataaccattttctatctctagattcgtcagtgcactcatgtaaccaacataccctaggtcctaaatatttatctccggaattagattttggataattcgcgcaccaacaatttctatttcctttatgatcgttacaaaagacgtataatgccgtatccccaaaagtaaaataatcaggacgaataattctaataaactcagaacaatatctcgcatccatatgtttggagcaaatatcggaataagtagacatagccggtttccgttttgcacgtaaccattctaaacaattggggtttccaggatcgtttctacaaaatccagtcatgaaatcgtcacaatgttctgtcttgtaattattattaaatatttttggacagtgtttggtatttgtcttagaacaacattttgccacgctatcactatcgcccaggagataatccttttttataaaatgacatcgttgcccggatgctatataatcagtagcgtgttttaaatccttaatatattcaggagttacctcgttctgataatagattaatgatccaggacgaaatttgaaagaactacatggttctccatgaattaatacatattgtttagcaaattcaggaactataaaactactacaatgatctatcgacataccatctatcaaacaaaacttgggtttaatttctcccggagatgtttcataatagtacgtataactttcttctgcaaacttaacagctctattatattcaggataattaaaacctaattccatatatttgtctcgtatatctgctattcctggtgctattttgattctattaagagtaacagctgcccccattcttaataatcgtcagtatttaaactgttaaatgttggtatatcaacatctaccttatttcccgcagtataaggtttgttgcaggtatactgttcaggaatggttacatttatacttcttctatagtcctgtctttcgatgttcatcacatatgcaaagaacagaataaacaaaataatgtaagaaataatattaaatatctgtgaattcgtaaatacattgattgccataataattacagcagctacaatacacacaatagacattcccacagtgttgccattacctccacgatacatttgagttactaagcaataggtaataactaagctagtaagaggcaatagaaaagatgagataaatatcatcaatatagagattagaggagggctatatagagccaagacgaacaaaatcaaaccgagtaacgttctaacatcattatttttgaagattcccaaataatcattcattcctccataatcgttttgcatcatacctccatctttaggcataaacgattgctgctgttcctctgtaaataaatctttatcaagcactccagcacccgcagagaagtcgtcaagcatattgtaatatcttaaataactcatttatatattaaaaaatgtcactattaaagatggagtataatctttatgccgaactaaaaaaaatgacttgtggtcaacccctaagtctttttaacgaagacggggatttcgtagaagttgaaccgggatcatcctttaagtttctgatacctaagggattttacgcctctccttccgtaaagacgagtctagtattcgagacattaacaacgaccgataataaaatcactagtatcaatccaacaaatgcgccaaagttatatcctcttcaacgcaaagtcgtatctgaagtagtttctaatatgaggaaaatgatcgaatcaaaacgtcctctatacatcactcttcacttggcgtgtggatttggtaagactattaccacgtgttatcttatggctacacacggtagaaaaaccgtcatttgcgtacccaataaaatgttaatacatcaatggaagacacaggtagaggcagtcggattggaacataagatatccatagatggagtaagtagtctattaaaggaactaaagactcaaagtccggatgtattaatagtagtcagtagacatctgacaaacgatgccttttgtaaatatatcaataagcattatgatttgttcatcttggatgaatcacatacgtataatctgatgaacaatacagcagttacaagatttttagcgtattatcctccgatgatgtgttattttttaactgctacacctagaccatctaaccgaatttattgtaacagtattattaatattgccaagttatccaatctaaaaaaaactatctatgcagtagatagtttttttgagccatattccacagataatattagacatatggtaaaacgactagatggaccatctaataaatatcatatatataccgagaagttattatctgtagacgagcctagaaatcaacttattcttgataccctggtagaagaattcaagtcaggaactattaatcgcattttagttattactaaactacgtgaacatatggtattattctacaaacgattattagattttttcggaccagaggttgtatttataggagacgcccaaaatagacgtactccagatatggtcaaatcaatcaaggaactaaatagatttatattcgtatccaccttattttattccggtactggtttagatattcctagtttggattcgttgttcatttgctcggcagtaatcaacaatatgcaaatagagcaattactagggagggtatgtcgagaaacagaactattagataggacggtatatgtatttcctaacacatccatcaaagaaataaagtacatgataggaaatttcatgcaacgaattattagtctgtctgtagataaactaggatttaaacaaaaaagttatcggaaacatcaagaatccgatcccacttctgcatgtacaacatcatccagagaagaacgtgtattaaatagaatatttaactcgcaaaatcgttaagaagtttaagcgacgatccgcatgctgcgcaggccagtgtattacccctcatagtattaatataatccaatgatacttttgtgatgtcggaaatcttaaccaatttagactgacaggcagaacacgtcatgcaatcatcatcgtcatcgataactgtagtcttgggcttctttttgcgactcttcattccggaacgcacattggtgctatccatttaggtagtaaaaaataagtcagaatatgccctataacacgatcgtgcaaaacctggtatatcgtctctatctttatcacaatatagtgtatcgacatttttattattattgacctcgtttatcttggaacatggaatgggaacatttttgttatcaacggccatctttgccttaattccagatgttgtaaaattataactaaacagtctatcatcgacacaaatgaaattcttgtttagacgtttgtagtttacgtatgcggctcgttcgcgtctcattttttcagatattgcaggtactataatattaaaaataagaatgaaataacataggattaaaaataaagttatcatgacttctagcgctgatttaactaacttaaaagaattacttagtctgtacaaaagtttgagattttcagattctgcggctatagaaaagtataattctttggtagaatggggaacatctacttactggaaaataggcgtgcaaaaggtagctaatgtcgagacgtcaatatctgattattatgatgaggtaaaaaataaaccgtttaatattgatccgggctattacattttcttaccggtatattttgggagcgtctttatttattcgaagggtaaaaatatggtagaacttggatctggaaactcttttcaaataccagatgatatgcgaagtgcgtgtaacaaagtattagacagcgataacggaatagactttctgagatttgttttgttaaacaatagatggataatggaagatgctatatcaaaatatcagtctccagttaatatatttaaactagctagtgagtacggattaaacatacccaaatatttagaaattgaaatagaggaagacacattatttgacgacgagttatactctattatagaacgctctttcgatgataaatttccaaaaatatccatatcgtatattaagttgggagaacttagacggcaagttgtagactttttcaaattctcattcatgtatattgagtccatcaaggtagatcgtataggagataatatttttattcctagcgttataacaaaatcaggaaaaaagatattagtaaaagatgtagaccatttaatacgatccaaggttagagaacatacatttgtaaaagtaaaaaagaaaaacacattttccattttatacgactatgatggaaacggaacagaaactagaggagaagtaataaaacgaattatagacactataggacgagactattatgttaacggaaagtatttctctaaggttggtagtgcaggcttaaagcaattgactaataaattagatattaatgagtgcgcaactgtcgatgagttagttgatgagattaataaatccggaactgtaaaacgaaaaataaaaaaccaatcagcatttgatttaagcagagaatgtttgggatatccagaagcggattttataacgttagttaataacatgcggttcaaaatagaaaattgtaaggttgtaaatttcaatattgaaaatactaattgtttaaataacccgagtattgaaactatatatggaaactttaaccagttcgtctcaatctttaatgtcgtcaccgatgtcaaaaaaagattattcgagtgaaataatatgcgcctttgatataggtgcaaaaaatcctgccagaactgttttagaagtcaaggataactccgttagggtattggatatatcaaaattagactggagttctgattgggaaaggcgcatagctaaagatttgtcacaatatgaatacactacagttcttctagaacgtcagcctagaaggtcgccgtatgttaaatttatctattttattaaaggctttttatatcatacatcggctgccaaagttatttgcgtctcgcctgtcatgtctggtaattcatatagagatcgaaaaaagagatcggtcgaagcatttcttgattggatggacacattcggattgcgagactccgttccggatagacgcaaattagacgatgtagcggatagtttcaatttggctatgagatacgtattagataaatggaatactaattatacaccttataataggtgtaaatctagaaattacataaaaaaaatgtaataacgttagtaacgccattatggataatctatttacctttctacatgaaatagaagatagatatgccagaactatttttaactttcatctaataagttgcgatgaaataggagatatatatggtcttatgaaagaacgcatttcctcagaggatatgtttgataatatagtgtataataaagatatacatcctgccattaagaaactagtgtattgcgacatccaacttactaaacacattattaatcagaatacgtatccggtatttaacgattcttcacaagtgaaatgttgtcattatttcgacataaactcagataatagcaatattagctctcgtacagtagagatatttgagagggaaaagtcatctcttgtatcatatattaaaactaccaataagaagagaaaggtcaattacggcgaaataaagaaaactgttcatggaggcactaatgcaaattacttttccggtaaaaagtctgacgagtatctgagtactacagttagatccaacattaatcaaccttggatcaaaaccatctctaagaggatgagagttgatatcattaatcactctatagtaacgcgtggaaaaagctctatattacaaactatagaaattatttttactaatagaacatgtgtgaaaatattcaaggattctactatgcacattattctatccaaggacaaggatgaaaaggggtgtatacacatgattgacaaattattctatgtctattataatttatttctgttgttcgaagatatcatccaaaacgagtactttaaagaagtagctaatgttgtaaaccacgtactcacggctacggcattagatgagaaattattcctaattaagaaaatggctgaacacgatgtttatggagttagcaatttcaaaatagggatgtttaacctgacatttattaagtcgttggatcataccgttttcccctctctgttagatgaggatagcaaaataaagttttttaaggggaaaaagctcaatattgtagcattacgatctctggaggattgtataaattacgtgactaaatccgagaatatgatagaaatgatgaaggaaagatcgactattttaaatagcatagatatagaaacggaatcggtagatcgtctaaaagaattgcttctaaaatgaaaaaaaacactaattcagaaatggatcaacgactagggtataagtttttggtgcctgatcctaaagccggagttttttatagaccgttacatttccaatatgtatcgtattctaattttatattgcatcgattgcatgaaatcttgaccgtcaagcggccactcttatcgtttaagaataatacagaacgaattatgatagaaattagcaatgttaaagtgactcctccagattactcacctataatcgcgagtattaaaggtaagagttatgacgcattagccacgttcactgtaaatatctttaaagaggtaatgaccaaagagggtatatccatcactaaaataagtagttatgagggaaaagattctcatttgataaaaattccgctactaataggatacgggaataaaaatccacttgatacagccaagtatcttgttcctaatgtcataggtggagtctttatcaataaacaatctgtcgaaaaagtaggaattaatctagtagaaaagattacaacatggccaaaatttagggttgttaagccaaactcattcactttctcgttttcctccgtatcccctcctaatgtattaccgacaagatatcgccattacaagatatctctggatatatcacaattggaagcgttgaatatatcatcgacaaagacatttataacggtcaatattgttttgctgtctcaatatttatctagagtgagtctagaattcattagacgtagtttatcatacgatatgcctccagaagttgtctatctagtaaacgcgataatagatagtgctaaacgaattactgaatctattactgactttaatattgatacatacattaatgacctggtggaagctgaacacattaaacaaaaatctcagttaacgatcaacgagttcaaatatgaaatgctgcataactttttacctcatatgaactatacacccgatcaactaaagggattttatatgatatctttactaagaaagtttctctactgtatcttccacacttctagatatccagatagagattcgatggtttgtcatcgcatcctaacgtacggcaaatattttgagacgttggcacatgatgaattagagaattacataggcaacatccgaaacgatatcatgaacaatcacaagaacagaggcacttacgcggtaaacattcatgtactaacaactcccggacttaatcacgcgttttctagcttattgagtggaaagttcaaaaagtcagacggtagttatcgaacacatcctcactattcatggatgcagaatatttctattcctaggagtgttggattttatccggatcaagtaaagatttcaaagatgttttctgtcagaaaataccatccaagtcaatatctttacttttgttcatcagacgttccggaaagaggtcctcaggtaggtttagtatctcaattgtctgtcttgagttccattacaaatatactaacgtctgagtatttggatttggaaaagaaaatttgtgagtatatcagatcatattataaagatgatataagttactttgaaacaggatttccaatcactatagaaaatgctctagtcgcatctcttaatccaaatatgatatgtgattttgtaactgactttagacgtagaaaacggatgggattcttcggtaacttggaggtaggtattactttagttagggatcacatgaatgaaattcgcattaatattggagcgggaagattagtcagaccattcttggttgtggataacggagagctcatgatggatgtgtgtccggagttagaaagcagattagacgacatgacattctctgacattcagaaagagtttccgcatgtcatcgaaatggtagatatagaacaatttacttttagtaacgtatgtgaatcggttcaaaaatttagaatgatgtcaaaggatgaaagaaagcaatacgatttatgtgactttcctgccgaatttagagatggatatgtagcatcttcattagtgggaatcaatcacaattctggacccagagctattcttggatgtgctcaagctaaacaagctatctcttgtctgagctcggatatacgaaataaaatagacaatggaattcatttgatgtatccagagaggccaatcgtgattagtaaggctttagaaacttcaaagattgcggctaattgcttcggccaacatgttactatagcattaatgtcgtacaaaggtatcaatcaagaggatggaattatcatcaaaaaacaatttattcagagaggcggtctcgatattgttacagccaagaaacatcaagtagaaattccattggaaaactttaataacaaagaaagagataggtctaacgcctattcaaaattagaaagtaatggattagttagactgaatgctttcttggaatccggagacgctatggcacgaaatatctcatcaagaactcttgaagatgattttgctagagataatcagattagcttcgatgtttccgagaaatataccgatatgtacaaatctcgcgttgaacgagtacaagtagaacttactgacaaagttaaggtacgagtattaaccatgaaagaaagaagacccattctaggagacaaatttaccactagaacgagtcaaaagggaacagtcgcgtatgtcgcggatgaaacggaacttccatacgacgaaaatggtatcacaccagatgtcattattaattctacatccatcttctctagaaaaactatatctatgttgatagaagttattttaacagccgcatattctgctaagccgtacaacaataagggagaaaaccgacctgtctgttttcctagtagtaacgaaacatccatcgatacatatatgcaattcgctaaacaatgttatgagcattcaaatccgaaattgtccgatgaagaattatcggataaaatcttttgtgaaaagattctctatgatcctgaaacggataagccttatgcatccaaagtattttttggaccaatttattacttgcgtctgaggcatttaactcaggacaaggcaaccgttagatgtagaggtaaaaagacgaagctcattagacaggcgaatgagggacgaaaacgtggaggaggtatcaagttcggagaaatggagagagactgtttaatagcgcatggtgcagccaatactattacagaagttttgaaagattcggaagaagattatcaagatgtgtatgtttgtgaaaattgtggagacatagcagcacaaatcaagggtattaatacatgtcttagatgttcaaaacttaatctctctcctctcttaacaaaaattgataccacgcacgtatctaaagtatttcttactcaaatgaacgccagaggcgtaaaagtcaaattagatttcgaacgaaggcctccttcgttttataaaccattagataaagttgatctcaagccgtcttttctggtgtaatattctagtttggtagtagatacatatcaatatcatcaaattcgagatccgaattataaaatgggcgtggattgttaactatagaatcggacgtctgatattcgaaaatctgtggagtttcaggttttggtggaggtgtaactgctacttgggatactgaagtctgatattcagaaagctgtggatgttctggttcggcatccaccgatggtgtcacatcactaatcggttcggtaacgtctgtggatggaggtgctacttctacagaacctgtagcctcagttgtcaacggagatacatttttaatgcgagaaaatgtataatttggtaatggtttcttatgtggatctgaagaagaggtaagatatctactagaaagataccgatcacgttctagttctcttttgtagaacttaactttttctttctccgcatctagttgatattccaacctcttcacgttactacgttcagattccaattcacgttcgcatgggttacctccgcagtttttacgagcgatttcacgttcagccttcatgcgtctctccctctctctatcgagtttatcagagcagtctttctgaaggcgatcgaactccataaatttctccaacgctttgattgtttccatagatttccgaagttcagcttttaggactgtgattctttttctttcgaattcacagctggatgtacaaccgtttccattaccgccatctctaagtttcttttctagatcggcaacatttcatccccatgccttttacattcctcgagtctactgtcgtcgaaatatcgttccagctccttttcgacatcaataactttagcacgttgtctctcaagctctcttttgtagttatctgattccctggcacgtttaagatcttcatgcaattgagtcagctcttaacttcctctcttgcttcttcgtcatagtacgcgcaatcactgtgagatccattgttaccacgtctacactcggcgagctcgcgtttaagagattcaatttcccgtttgtattggtccatgtttccattgctaccaccattagatttacaggctgctagttgtcgttcgagatcagaaatacgggttttcttggaattgatttcgtcgatgtacttggcatcgaaacacttattaagttctttttccaattctacgattttatttctttcgcgagtcaattccctcctgtagtaactatctgttttgtcagattcacgctctctacgtagactttcttgcaagttactaatttgttccctagcacgtccgagtttagttttatatgctgaatagagttctgattcatcctttgagcagatctctagcgatcgtttaagattcctaattctagtctttagcctatttacctcctcagaagatgttccgttaccgttgcgtttacactcgttaagctgtctatcaagatccatgattctatctctaagacgttgcatctctctttccatatcagcattgctttcattattacgtctgcagtcactcaactgtctttcaatatctgagattctatctctaagacgtcgcatctctctctgtttcggcattggtttcattattacgtttacagtcgttcaactgtctttcaagatctgatattctagattggagtctgctaatctctgtagcattttcacggcattcactcagttgtctttcaagatctgaaattttagattggagtctgctaatctctgtaagatttcctcctccgctctcgatgcagtcggtcaacttattctctagttctctaatacgcgaacgcagtgcatcaacttcttgcgtgtcttcctggttgcgtgtacattcatcgagatctctaacgcgtcgtcgttcttcctcaagttctctgcgtactacagaaagcgtgtccctatcttgttgatatttagcaatttctgattctagagtactgattttgcttacgtagttactaatagttgtcttggccttatcaagatcctccttgtatttgtcgcattccttgatatccctacgaagtctggacagttcccattcgacattacgacgtttatcgatttcagctcggagatcgtcatcgcgttgttttagccacatacgactgagttcaagttctcgttgacaagatccatctacttttccattcctaatagtatccagttccttttctagttctgaacgcatttctcgttccctatcaagcgattctctcaattctcggatagtcttcttatcaatttctaataaatctgaaccatcatctgtcccattttgaatatccctgtgttctttgatctcttttgtaagtcggtcgattctttcggttttataaacagaatccctttccaaagtcctaatcttactgagtttatcactaagttctgcattcaattcggtgagttttctcttggcttcttccaactctgttttaaactctccactatttccgcattcttcctcgcatttatctaaccattcaattagtttattaataactagttggtaatcagcgattcctatagccgttcttgtaattgtgggaacataattaggatcttctaatggattgtatggcttgatagcatcatctttatcattattagggggatggacaaccttaattggttggtcctcatctcctccagtagcgtgtggttcttcaataccagtgttagtaataggcttaggcaaatgcttgtcgtacgcgggcacttcctcatccatcaagtatttataatcgggttctacttcagaatattcttttctaagagacgcgacttcgggagttagtagaagaactctgtttctgtatctatcaacgctggaatcaatactcaagttaaggatagcgaatacctcatcgtcatcatccgtatcttctgaaacaccatcatatgacatttcatgaagtctaacgtattgataaatagaatcagatttagtattaaacagatccttaacctttttagtaaacgcatatgtatattttagatctccagatttcataatatgatcacatgccttaaatgtcagtgcttccatgatataatctggaacactaatgggtgacgaaaaagatacagcaccatatgctacgttgataaataaatctgaaccactaagtagataatgattaatgttaagaaagaggaaatattcagtgtataggtatgtcttggcgtcatatcttgtactaaacacgctaaacagtttgttaatgtgatcaatttccaatagattaattagagcagcgggaataccaacaaacatattaccacatccgtattttctatgaatatcacatatcatgttaaaaaatcttgatagaagagcgaatatctcgtctgacttaatgagtcgtagttcagcagcaacataagtcataactgtaaatagaacatactttcctgtagtgttgattctagactccacatcaacaccattattaaaaatagttttatatacatctttaatctgctctccgttaatcgtcgaacgttctagtatacggaaacactttgatttcttatctgtagttaatgacttagtgatatcacgaagaatattacgaattacatttcttgtttttcttgagagacctgattcagaactcaactcatcgttccatagtttttctacctcagtggcgaaatctttggagtgcttggtacatttttcaataaggttcgtgacctccatttattataaaaaatttattcaaaacttaactacaatcgggtaattataagatcgtagatctcccatgtggcggaatactaccatctatcgcatgtggatggacagtaggtaatggccatgggaacagtaatgtttgcatatttatctttcttgctagtattactgcatattgtcccaatgtttcgatgtgatgttctaacctatcaactgccgctgtatcacaacaatagtgtccgatgaaattaagattatgatccaatgtgtttaatatatgattatcaagtcttatacgatccgcgtcttttttgacaggatcaggttcttctacaggaagaagtttcggcctcttatgatattcatgtctgggaaacggtggtctagggtgaggctccggtatcggagtgggttttggattataatcatcatcgtctatgacatcatcttcgacttcgatatttattttgctatcttgatgatgtcctgtatcagttgcattttcagcactcgactgaatattagcgcattcattgtctattattaccatatttctaaacccaaaatgtatgtgttgaacatcagtactatcgttgatgagtcttatagcatgaattcgcttatcgttatcgggtttatcttctgtcaccttagcaattccttttttattaaactctacataatcatatccatttctattgtttgttctaatataaacgagtatagcatcattgctaaatttttcaatagtatcaaaaacagaatatcctaaaccatataatatatattcaggaacactcaaactaaatgtccaggattctcctaaatacgtaaactttaatagtgcgaaatcattcaaaaatctaccacttatagatagatagtacataaatgcgtatagtagtctacctatctctttattatgaaaaccggcattacgatcatatatgtcgtgatatacctgtgatccgtttacgttaaaccataaatacatgggtgatcctataaacatgaatttatttctaattctcagagctatagttaattgaccgtgtaatatttgcttacatgcatacttgatacgcttattaataagatttttatcattgctcgttatttcagaatcgtatatataaggagtaccatcgtgattcttaccagatattatacaaaatactatatataaaatatattgacccacgttagtaatcatataaatgtttaacgttttaaattttgtattcaatgatccattatcatacgctatcatggtcttgtaatattcattctttaaaatataatattgtgttagccattgcattggagctcctaatggagattttctattctcatccattttaggataggctttcataaagtccctaataacttcgtgaataatgtttctatgttttctactgatgcatgtatttgcttcgatttttttatcccatgtttcatctatcatagatttaaacgcagtaatgctcgcaacattaacatcttgaaccgttggtacaattccgttccataaatttataatgttcgccatttatataactcattttttgaatatacttttaattaacaaaagagttaagttactcatatggacgccgtccagtctgaacatcaatctttttagccagagatatcatagccgctcttagagtttcagcgtgattttccaacctaaatagaacttcatcgttgcgtttacaacacttttctatttgttcaaactttgttgttacattagtaatctttttttccaaattagttagccgttgtttgagagtttcctcattgtcgtcttcatcggctttaacaattgcttcgcgtttagcctctggctttttagcagcctttgtagaaaaaaattcagttgctggaattgcaagatcgtcatctccggggaaaagagttccgtccatttaaagtacagattttagaaactgacactctgcgttatttatatttggtacaacacatggattataaatattgatgttaataacatcagaaaatgtaaagtctatacattgttgcatcgtgttaaattttctaatggatctagtattattgggtccaacttctgcctgaaatccaaatatggaagcggatacaaaaccgtttcctggataaaccacacatctccacttttgctttacatcagaaattgtgtcgttgacatcttgaactctcctatctaatgccggtgttccacctatagattttgaatattcgaatgctgcatgagtagcattaaattccttaatattgccataattttcatatattgagtaaccctggataaaaagtaaacacaccgcagccgtcgctaccacaataaaaaaaattgatagagagttcatttataatctattagaagctgacaaaatttttttacacgcatcagacaatgctttaataaatagttcaacatctacttttgtcatatcgaaccgatggtatgattctaacctagaattacatccgaaaaagttgactatgttcatagtcattaagtcattaacaaacaacattccagactctggattataagacgatactgtttcgtcacaattacctaccttaatcatgtgattatgaatattggctattagagcaccttctaagaaatctataatatctttgaaacacgatttaaaatcaaaccacgaatatacttctacgaagaaagttagtttacccataggagaaataactataaatggagatctaaatacaaaatccggatctatgatagttttaacattattatattctctattaaatacctccacatctaaaaatgttaattttgaaactatgtcttcgtttattaccgtacctgaactaaacgctataagctctattgtttgagaactctttaaacgatattcttgaaatacatgtaacaaagtttcctttaactcggtcggtttatctaccatagttacagaatttgtatccttatctataatataataatcaaaatcgtataaagttatataattatcgcgttcagattgtgatcttttcaaatagactaaaaaccccatttctctagtaagtatcttatgtatatgtttgtaaaatatcttcatggtgggaatatgctctaccgcagttagccattcctcattgacagcggtagatgtattagacaaaactattccaatgtttaacaagggccattttacgagattattaaatccttgtttgataaatgtagccaatgagggttcgagttcaacgacgattgaattctcttcccgcggatgctgcatgatgaacgacgggatgttgttcgattgatttggaattctttttcgactttttgtttatattaaatattttaaaatttatagcggatagcaattcatgtaccacggataatgtagacgcgtattgcgcatcgatatctttattattagataaatttatcaataaatgtgagaagtttgcctcgttaaggtcttccatttaaatattatataaacatttgtgtttgtatcttattcgtcttttatggaatagttttttactagtaaagctgcaattacacactttgtccgtaaaacataaatataaacaccagcttttatcaatcgttccaaaaagtcgacggcggacatttttaacatggcatctattttaaatacacttaggtttttggaaaaaacatcattttataattgtaacgattcaataactaaagaaaagattaagattaaacataagggaatgtcatttgtattttataagccaaagcattctaccgttgttaaatacttgtctggaggaggtatatatcatgatgatttggttgtattggggaaggtaacaattaataatctaaagatgatgctattttacatggatttatcatatcatggagtgacaagtagtggagcaatttacaaattgggatcgtctatcgatagactttctctaaataggactattgttacaaaagttaataattatgatgatacattttttgacgacgatgattgatcgctattgcacaattttgtttttgtactttctaatatagtgtttaggttctttttcatatgagaatattgatttactaaaatatctatgtttaacttttgttctatgacgtccttatcggcggtatcggtacatatacgtaattcaccttcacaaaatacggagtcttcgataataatagccaatcgattattggatctagctgtctgtatcatattcaacatgtttaatatatcctttcgtttcccctttacaggcatcgatcgtagcatattttccgcgtctgatatggaaatgttaaaactacaaaaatgcgtaatgttagcccgtcctaatattggtacgtgtctataagtttggcatagtagaataatagacgtgtttaaatgccttccaaagtttaagaattctattagagtattgcattttgatagtttatcgcctacatcatcaaaaataagtaaaaagtgtgctgattttttatgattttgtgcgacagcaatacatttttctatgttacttttagttcgtatcagattatattctagagattcctgactactaacgaaattaatatgatttggccaaatgtatccatcataatctgggttataaacgggtgtaaacaagaatatatgtttatattttttaactagtgtagaaaacagagatagtaaatagatagtttttccagatccagatcctcctgttaaaaccattctaaacggcatttttaataaattttctcttgaaaattgtttttcttggaaacaattcataattatatttacagttactaaattaatttgataataaatcaaaatatggaaaactaaggttgttagtagggaggagaacaaagaaggcacatcgtgatataaataacatttattatcatgatgacaccagaaaacgacgaagagcagacatctgtgttctccgctactgtttacggagacaaaattcagggaaagaataaacgcaaacgcgtgattggtctatgtattagaatatctatggttatttcactactatctatgattaccatgtccgcgtttctcatagtgcgcctaaatcaatgcatgtctgctaacgaggctgctattactgacgccgctgttgccgttgctgctgcatcatctactcatagaaaggttgcgtctagcactacacaatatgatcacaaagaaagctgtaatggtttatattaccagggttcttgttatatattacattcagactaccagttattctcggatgctaaagcaaattgcactgcggaatcatcaacactacccaataaatccgatgtcttgactacctggctcattgattatgttgaggatacatggggatctgatggtaatccaattacaaaaactacatccgattatcaagattctgatgtatcacaagaagttagaaagtatttttgtgttaaaacaatgaactaatatttatttttgtacattaataaatgaaatcgcttaatagacaaactgtaagtaggtttaagaagttgtcggtgccggccgctataatgatgatactctcaaccattattagtggcataggaacatttctgcattacaaagaagaactgatgcctagtgcttgcgccaatggatggatacaatacgataaacattgttatttagatactaacattaaaatgtctacagataatgcggtttatcagtgtcgtaaattacgagctagattgcctagacctgatactagacatctgagagtattgtttagtattttttataaagattattgggtaagtttaaaaaagaccaatgataaatggttagatattaataatgataaagatatagatattagtaaattaacaaattttaaacaactaaacagtacgacggatgctgaagcgtgttatatatacaagtctggaaaactggttaaaacagtatgtaaaagtactcaatctgtactatgtgttaaaaaattctacaagtgacaacaaaaaatgaattaataataagtcgttaacgtacgccgccatggacgccgcgtttgttattactccaatgggtgtgttgactataacagatacattgtatgatgatctcgatatctcaatcatggactttataggaccatacattataggtaacataaaaactgtccaaatagatgtacgggatataaaatattccgacatgcaaaaatgctactttagctataagggtaaaatagttcctcaggattctaatgatttggctagattcaacatttatagcatttgtgccgcatacagatcaaaaaataccatcatcatagcatgcgactatgatatcatgttagatatagaagataaacatcagccattttatctattcccatctattgatgtttttaacgctacaatcatagaagcgtataacctgtatacagctggagattatcatctaatcatcaatccttcagataatctgaaaatgaaattgtcgtttaattcttcattctgcatatcagacggcaatggatggatcataattgatgggaaatgcaatagtaattttttatcataaaagttgtaaagtaaataataaaacaataaatattgaactagtagtacgtatattgagcaatcagaaatgatgctggtacctcttatcacggtgaccgtagttgcgggaacaatattagtatgttatatattatatatttgtaggaaaaagatacgtactgtctataatgacaataaaattatcatgacaaaattaaaaaagataaagagttctaattccagcaaatctagtaaatcaactgatagcgaatcagactgggaggatcactgtagtgctatggaacaaaacaatgacgtagataatatttctaggaatgagatattggacgatgatagcttcgctggtagtttaatatgggataacgaatccaatgttatggcgcctagcacagaacacatttacgatagtgttgctggaagcacgctgctaataaataatgatcgtaatgaacagactatttatcagaacactacagtagtaattaatgaaacggagactgttgaagtacttaatgaagataccaaacagaatcctaactattcatccaatcctttcgtaaattataataaaaccagtatttgtagcaagtcaaatccgtttattacagaacttaacaataaatttagtgagaataatccgtttagacgagcacatagcgatgattatcttaataagcaagaacaagatcatgaacacgatgatatagaatcatcggtcgtatcattggtgtgattagtttcctttttataaaattgaagtaatatttagtattattgctgccgtcacgttgtacaaatggagatattccctgtattcggcatttctaaaattagcaattttattgctaataatgactgtagatattatatagatacagaacatcaaaaaattatatctgatgagatcaatagacagatggatgaaacggtacttcttaccaacatcttaagcgtagaagttgtaaatgacaatgagatgtaccatcttattcctcatagattatcgacgattatactctgtattagttctgtcggaggatgtgttatctctatagataatgacatcaatggcaaaaatattctaacctttcccattgatcatgctgtaatcatatccccactgagtaaatgtgtcgtagttagcaagggtcctacaaccatattggttgttaaagcggatatacctagcaaacgattggtaacatcgtttacaaacgacatactatatgtaaacaatctgtcactgattaattatttgccgttgtctgtattcattattagacgagtcaccgactatttggatagacacatatgcgatcagatatttgctaataataagtggtattcccttataaccatcgacgataagcaatatcctattccatcaaactgtataggtatgtcctctgccaagtacataaattctagcatcgagcaagatactttaatccatgtttgtaacctcgagcatccgttcgactcagtatacaaaaaaatgcagtcgtacaattctctacctatcaaggaacaaatattgtacggtagaattgataatataaatatgagcattagtatttctgtggattaatagatttctagtatggggatcattaatcatctctaatctctaaatacctcataaaacgaaaaaaaagctattatcaaatactgtacggaatggattcattctcttctctttttatgaaactctgttgtatatctactgataaaactggaagcaaaaaatctgatagaaagaataagaataagatcaaggattatatggaacacgattattataaaataacaatagttcctggttcctcttccacgtctactagctcgtggtattatacacatgcctagtaatagtctctttgcgttgacggaaagcagactagaaataacaggctaaaatgttcagacaccataatagttcccaacccagataataacagagttccatcaacacattcctttaaactcaatcccaaacccaaaaccgttaaaatgtatccggccaattgatagtagataatgaggtgtacagcgcatgataatttacacagtaaccaaaatgaaaatactttagtaattataagaaatatagacggtaatgtcatcatcaacaatccgataatatgcctgagagtaaacattgacggataaaacaaaaatgctccgcataactctatcatggcaataacacaaccaaatacttgtaagattcctaaattagtagaaaatacaacgaatatcgatgtataagtgatctcgagaaataataagaataaagtaatgcccgtaaagataaacatcaacattgtttggtaatcattaaaccaattagtatgaagttgaactaatttcacagtagattttattccagtgttatcctcgcatgtataagtacctggtaagatatctttatattccataatcaatgagacatcactatctgataacgaatgaagtctagcactagtatgccatttacttaatattgtcgtcttggaagttttattataagttaaaatatcatggttatccaatttccatctaatatactttgtcggattatctatagtacacggaataatgatggtatcattacatgctgtatactctatggtctttgtagttgttataacaaccaacgtatagaggtatatcaacgatattctaactcttgacattttttatttatttaaaatgatacctttgttatttattttattctattttgctaacggtattgaatggcataagtttgaaacgagtgaagaaataatttctacttacttattagacgacgtattatacacgggtgttaatggggcggtatacacattttcaaataataaactaaacaaaactggtttaactaataataattatataacaacatctataaaagtagaggatgcggataaggatacattagtatgcggaaccaataacggaaatcccaaatgttggaaaatagacggttcagacgacccaaaacatagaggtagaggatacgctccttatcaaaatagcaaagtaacgataatcagtcacaacggatgtgtactatctgacataaacatatcaaaagaaggaattaaacgatggagaagatttgacggaccatgtggttatgatttattcacggcggataacgtaattccaaaagatggtttacgaggagcattcgtcgataaagacggtacttatgacaaagtttacattcttttcactgatactatcggctcaaagagaattgtcaaaattccgtatatagcacaaatgtgcctaaacgacgaaggtggtccatcatcattgtctagtcatagatggtcgacgtttctcaaagtcgaattagaatgtgatatcgacggaagaagttatagacaaattattcattctagaactataaaaacagataatgatacgatactatatgtattcttcgatagtccttattccaagtccgcattatgtacctattctatgaataccattaaacaatctttttctacgtcaaaattggaaggatatacaaagcaattgccgtctccagctcctggtatatgtttaccagctggaaaagttgttccacataccacgtttgaagtcatagaacaatataatgtactagatgatattataaagcctttatctaaccaacctatcttcgaaggaccgtctggtgttaaatggttcgatataaaggagaaggaaaatgaacatcgggaatatagaatatacttcataaaagaaaattctatatattcgttcgatacaaaatctaaacaaactcgtagctcgcaagtcgatgcgcgactattttcagtaatggtaactgcgaaaccgttatttatagcagatatagggataggagtaggaatgccacaaatgaaaaaaatacttaaaatgtaatcttaatcgagtacaccacacgacaatgaacaaacataagacagattatgctggttatgcttgctgcgtaatatgcggtctaattgtcggaattatttttacagcgacactattaaaagttgtagaacgtaaattagttcatacaccattaatagataaaacgataaaagatgcatatattagagaagattgtcctactgactggataagctataataataaatgtatccatttatctactgatcgaaaaacctgggaggaaggacgtaatgcatgcaaagctctaaattcaaattcggatctaattaagatagagactccaaacgagttaagttttttaagaagccttagacgaggctattgggtaggagaatccgaaatattaaaccagacaaccccatataattttatagctaagaatgccacgaagaatggaactaaaaaacggaaatatatttgtagcacaacgaatactcccaaactgcattcgtgttacactatataacaattacactacatttttatcataccactacttcggttagatgttttagaaaaaaataaatatcgccgtaccgttcttgtttttataaaaataacaattaacaattatcaaattttttctttaatattttacgtggttgaccattcttggtggtaaaataatctcttagtgttggaatggaatgctgtttaatgtttccacactcatcgtatattttgacgtatgtagtcacatcgtttacgcaatagtcagactgtagttctatcatgcttcctacatcagaaggaggaacagttttaaagtctcttggttttaatctattaccgttagttttcatgaaatcctttgttttatccacttcacattttaaataaatgtccactatacattcttttgttaattttactagatcgtcatgggtcatagaatttataggttccgtagtccatggatccaaactagcaaacttcgcgtatacggtatcgcgattagtgtatacaccaactgtatgaaaattaagaaaacagtttaataaatcaacagaaatatttaatcctccgtttgatacagatgcgccatatttatggatttcggattcacacgttgtttgtctgaggtgttcgtctagtgttgcttctacgtaaacttcgattcccatatattctttattgtcagaatcgcataccgatttatcatcatacactgtttgaaaactaaatggtatacacatcaaaataataaataataacgagtacattctgcaatattgttatcgtaattggaaaaatagtgttcgagtgagttggattatgtgagtattggattgtatattttattttatattttgtaataagaataaaatgctaatgtcaagtttattccaatagatgtcttattaaaaacatatataataaataacaatggctgaatggcataaaattatcgaggatatctcaaaaaataataagttcgaggatgccgccatcgttgattacaagactacaaagaatgttctagctgctattcctaacagaacatttgccaagattaatccgggtgaaattattcctctcatcactaatcgtaatattctaaaacctcttattggtcagaaatattgtattgtatatactaactctctaatggatgagaacacgtatgctatggagttgcttactgggtacgcccctgtatctccgatcgttatagcgagaactcataccgcacttatatttttgatgggtaagccaacaacatccagacgtgacgtgtatagaacgtgtagagatcacgctacccgtgtacgtgcaactggtaattaaaataaaaagtaatattcatatgtagtgtcaattttaaatgatgatgatgaaatggataatatccatattgacgatgtcaataatgccggtattggcatacagttcatcgatttttagatttcattcagaggatgtggaattatgttatgggcatttgtattttgataggatctataatgtagtaaatataaaatataatccgcatattccatatagatataattttattaatcgcacgttaaccgtagatgaactagacgataatgtcttttttacacatggttattttttaaaacacaaatatggttcacttaatcctagtttgattgtctcattatcaggaaacttaaaatataatgatatacaatgctcagtaaatgtatcgtgtctcattaaaaatttggcaacgagtacatctactatattaacatctaaacataagacttattctctacatcggtccacgtgtattactataataggatacgattctattatatggtataaagatataaatgacaagtataatgacatctatgattttactgcaatatgtatgctaatagcgtctacattgatagtgaccatatacgtgtttaaaaaaataaaaatgaactcttaattatgctatgctattagaaatggataaaatcaaaattacggttgattcaaaaattggtaatgttgttaccatatcgtataacttggaaaagataactattgatgtcacacctaaaaagaaaaaagaaaaggatgtattattagcgcaatcagttgctgtcgaagaggcaaaagatgtcaaggtagaagaaaaaaatattatcgatattgaagatgacgatgatatggatgtagaaagcgcgtaatacgatctataaaaataagtatataaatactttttatttactgtactcttactgtgtagtggtgataccctactcgattatttttttaaaaaaaaaatacttattctgattcttctagccatttccgtgttcgtttgaatgccacatcgacgtcaaagataggggagtagttgaaatctagttctgcattgttggtacgcacctcaaatgtagtgttggatatcttcaacgtatagttgttgagtagtgatggttttctaaatagaattctcttcatatcattcttgcacgcgtacatttttagcatccatcttggaatcctagatccttgttctattcccaatggtttcatcaatagaagattaaacatatcgtacgaacacgatggagagtaatcgtagcaaaagtaagcatttcctttaatcttagatcccggatactggatatattttgcagccaacacgtgcatccatgcagcatttcctacatatacccggctatgcaccgcgtcatcatcgactgtacgatacataatgttaccgtgttgcttacattgctcgtaaaagactttcatcaatttgtctccttctccgtaaattccagtgggtcttaggcaacaagtatacaattttgctccattcatgattacggaattattggctttcataaccagttgctcggccatacgtttactttttgcgtatacatgtcctggtgatatatcataaagggtatgctcatggccgatgaatggatcaccgtgtttattgggtcctattgcttccatgctactagtatagatcaaatacttgattcctaggtccacacaagctgccaaaatagtctgtgttccataatagtttactttcatgatttcattatcggtgtattttccaaatacatccactagagcagccgtatgaataatcagatttaccccatctagcgcttctctcaccttatcaaagtcgtttatatcacattgtatatagtttataaccttaactttcgaggttattggttgtggatcttctacaatatctatgactctgatttcttgaacatcatctgcactaattaacagttttactatatacctgcctagaaatccggcaccaccagtaaccgcgtacacggccattgctgccactcataatatcagactacttattctattttactaaataatggctgtttgtataatagaccacgataatatcagaggagttatttactttgaaccagtccatggaaaagataaagttttaggatcagttattggattaaaatccggaacgtatagtttgataattcatcgttacggagatattagtcaaggatgtgattccataggcagtccagaaatatttatcggtaacatctttgtaaacagatatggtgtagcatatgtttatttagatacagatgtaaatatatttacaattattggaaaggcgttatctatttcaaaaaatgatcagagattagcgtgtggagttattggtatttcttacataaatgaaaagataatacattttcttacaattaacgagaatggcgtttgatatatcagttaatgcgtctaaaacaataaatgcattagtttacttttctactcagcaaaataaattagtcatacgtaatgaagttaatgatacacactacactgtcgaatttgatagggacaaagtagttgacacgtttatttcatataatagacataatgacaccatagagataagaggggtgcttccagaggaaactaatattggttgcgcggttagtatgacttacttgtataataagtatagttttaaactgattttagcagaatatataagacacagaaatactatatccggcaatatttattcggcattgatgacactagatgatttggctattaaacagtatggagacattgatctattatttaatgagaaacttaaagtagactccgattcgggactatttgactttgtcaactttgtaaaggatatgatatgttgtgattctagaatagtagtagctctatctagtctagtatctaaacattgggaattgacaaataaaaaatataggtgtatggcattagccgaacatatatctgatagtattccaatatctgagctatctagactacgatacaatctatgtaagtatctacgcggacacactgagagcatagaggataaatttgattattttgaagacgatgattcgtctacatgttctgccgtaaccgacagggaaacggatgtataattttttttatagcgtgaaggatatgataaaaaatataattgttgtatttatcccattccaatcaccttatatgattctgtaacacaataaaggagtcttatagatgtatagaggtcagatactggtttgataaactgtttattccacataagtatgtttgactttatggttagacccgcatactttaacaaatcactgaaaattggagttaggtattgacctctcagaatcagttgccgttctggaacattaaatgtattttttatgatatactccaacgcatttatgtgggcatacaacaagtcattactaatggaatattccaagagttttagttgtctagtatttaacaagagaagagatttcaacagactgtttatgaactcgaatgccgcctcattgtcgcttatattgatgatgtcgaattctcccaatatcatcaccgatgagtagctcatcttgttatcgggatccaagttttctaaagatgtcattaaaccctcgatcatgaatggatttatcatcatcgtttttatgttggacatgagcttagtccgtttgtccacatctatagaagatgatttctgaattatttcatatatctctctctttaactccaggaacttgtcaggatggtctactttaatatgttctcgtctaagagatgaaaatctttggatggttgcacgcgacttttctctaaaggatgacgttgcccaagatcctctcttaaatgaatccatcttatccttggacaagatggacagtctattttccttagatggtttaatatttttgttacccatgatctataaaggtagacctaatcgtctcggatgaccatatatttattttcagttttattatacgcataaattgtaaaaaatatgttaggtttacgaaaatgtctcgtggggcattaatcgtttttgaaggattggacaaatctggaaaaacaacacaatgtatgaacatcatggaatcaataccttcaaacacaataaaataccttaactttcctcagagatccactgtcactggaaagatgatagatgactatctaactcgtaaaaaaacctataatgatcatatagttaatctattattttgtgcaaatagatgggagtttgcatcttttatacaagaacaactagaacagggaattactttaatagttgatagatacgcattttctggagtagcgtatgccgccgctaaaggcgcgtcaatgactctcagtaagagttatgaatctggattgcctaaacccgacttagttatattcttggaatctggtagcaaagaaattaatagaaacgtcggtgaggaaatttatgaagatgttacattccaacaaaaggtattacaagaatataaaaaaatgattgaagaaggagatattcattggcaaattatttcttctgaattcgaggaagatgtaaagaaggagttgattaagaatatagttatagaggctatacacacggttactggaccagtggggcaactgtggatgtaatagtgaaattacattttttataaatagatgttagtacagtgttataaatggatgaagcatattactctggcaacttggaatcagtactcggatacgtgtccgatatgcataccgaactcgcatcaatatctcaattagttattgccaagatagaaactatagataatgatatattaaacaaggacattgtaaattttatcatgtgtagatcaaacttggataatccatttatctctttcctagatactgtatatactattatagatcaagagaactatcagactgagttgattaattcattagacgacaatgaaattatcgattgtatagttaataagtttatgagcttttataaggataacctagaaaatatagtagatgctatcattactctaaaatatataatgaataatccagattttaaaactacgtatgccgaagtactcggttccagaatagccgatatagatattaaacaagtgatacgtaagaatatactacaattgtctaataatatccgcgaacgatatttgtgaaaatattaaaaaaaaatactttttttattaaatgacgtcttttcgtgaatttagaaaattatgctgtgctatatatcacgcatcaggatataaagaaaaatctaaattaattagagactttataacagatagggatgataaatatttgatcattaagctattgcttcccggattagacgatagaatttataacatgaacgataaacaaattataaaattatatagtataatatttaaacaatctcaggaagatatgctacaagatttaggatacggatatataggagacactattaggactttcttcaaagagaacacagaaatccgtccacgagataaaagcattttaactttagaagaagtggatagttttttaactacgttatcatccgtaactaaagaatcgcatcaaataaaattattgactgatgtagcatctgtttgtacatgtaatgatttaaaatgtgtagtcatgcttattgataaagatctaaaaattaaagcgggtcctcggtacgtacttaacgctattagtcctaatgcctatgatgtgtttagaaaatctaataacttgaaagagataatagaaaattcatctaaacaaaatctagactctatatctatttctgttatgactccaattaatcccatgttagcggaatcgtgtgattctgtcaataaggcgtttaaaaaatttccatcaggaatgtttgcggaagtcaaatacgatggtgaaagagtacaagttcataaaaataataacgagtttgccttctttagtagaaacatgaaaccagtactctctcataaagtggattatctcaaagaatacataccgaaagcatttaaaaaagctacgtctatcgtattggattctgaaattgttcttgtagacgaacataatgtaccgctcccgtttggaagtttaggtatacacaaaaagaaagaatataaaaactctaacatgtgtttgttcgtgtttgactgtttgtactttgatggattcgatatgacggacattccattgtacgaacgaagatcttttctcaaagatgttatggttgaaatacccaatagaatagtattctcagagttgacgaatattagtaacgagtctcagttaactgacgtattggatgatgcactaacgagaaaattagaaggattggtcttaaaagatattaatggagtatacgaaccgggaaagagaagatggttaaaaataaagcgagactatttgaacgagggttccatggcagattctgccgatttagtagtactaggtgcctactatggtaaaggagcaaagggtggtatcatggcagtctttctaatgggttgttacgacgatgaatccggtaaatggaagacggttaccaagtgttcaggacacgatgataatacgttaagggagttgcaagaccaattaaagatgattaaaattaacaaggatcccaaaaaaattccagagtggttagtagttaataaaatctatattcccgattttgtagtagaggatccgaaacaatctcagatatgggaaatttcaggagcagagtttacatcttccaagtcccataccgcaaatggaatatccattagatttcctagatttactaggataagagaggataaaacgtggaaagaatctactcatctaaacgatttagtaaacttgactaaatcttaatagttacatacaaactgaaaattaaaataacactatttagttggtggtcgccatggatggtgttattgtatactgtctaaacgcgctagtaaaacatggcgaggaaataaatcatataaaaaatgatttcatgattaaaccatgttgtgaaagagtttgtgaaaaagtcaagaacgttcacattggcggacaatctaaaaacaatacagtgattgcagatttgccatatatggataatgcggtatccgatgtatgcaattcactgtataaaaagaatgtatcaagaatatccagatttgctaatttgataaagatagatgacgatgacaagactcctactggtgtatataattattttaaacctaaagatgccattcctgttatcatatctataggaaaggataaagatgtctgtgaactattaatctcatcagacatatcgtgtgcatgcgtggagttaaattcatatcacgtagccattcttcccatggatgtttccttttttaccaaaggaaatgcatcattgattattctcctgtttgatttctctatcgatgcggcacctctcttaagaagtgtaaccgataataatgttattatatctagacaccagcgtctacatgacgagcttccgagttccaattggttcaagttttacataagtataaagtccgactattgttctatattatatatggttgttgatggatctgtgatgcatgcgatagctgataatagaactcacgcaattattagcaaaaatatattagacaatactacgattaacgatgagtgtagatgctgttattttgaaccacagattaggattcttgatagagatgagatgctcaatggatcatcgtgtgatatgaacagacattgtattatgatgaatttacctgatgtaggcgaatttggatctagtatgttggggaaatatgaacctgacatgattaagattgctctttcggtggctggtaatttaataagaaatcgagactacattcccgggagacgaggatatagctactacgtttacggtatagcctctagataatttttttaagcacgaaataaaaaacataattttaaaccaatctatttcatactattttgtgtgatcaccatggacataaagatagatattagtatttctggtgataaatttacggtgactactaggagggaaaatgaagaaagaaaaaaatatctacctctccaaaaagaaaaaactactgatgttatcaaacctgattatcttgagtacgatgacttgttagatagagatgagatgtttactattctagaggaatattttatgtacagaggtctattaggcctcagaataaaatatggacgactctttaacgaaattaaaaaattcgacaatgatgcggaagaacaattcggtactatagaagaactcaagcagaaacttagattaaattctgaagagggagcagataactttatagattatataaaggtacaaaaacaggatatcgtcaaacttactgtatacgattgcatatctatgataggattgtgtgcatgcgtggtagatgtttggagaaatgagaaactgttttctagatggaaatattgtttacgagcgattaaactgtttattgatgatcacatgcttgataagataaaatctatactgcagaatagactagtatatgtggaaatgtcatagaaagttaaaagttaatgagagcaaaaatatataaggttgtattccatatttgttatttttttctgtaatagttagaaaaatacattcgatggtctatctatcagattattatgtgttataaggtactttttctcataataaactagagtatgagtaagatagtgtttttcaaaacatataaatctaaaattgatggatgagatatacagctattaatttcgaaaatatattttaatctgataactttaaacatggatttttaatggtggtttaacgttttaaaaaaagattttgttattgtagtatatgataatattaaaagatggatataaagaatttgctgactgcatgtactattttttacattactacattggctacggcagatatacctacttcgtcactgccacacgctccggtaaacggggcatgtgacgagggagaatatcttgataagaggcataatcaatgttgtaatcagtgtccacctggagaatttgccaaggttagatgtaatggtaacgataacacaaaatgtgaacgctgcccacctcatacatataccgcaatccccaattactctaatggatgtcatcaatgtagaaaatgcccaacaggatcatttgataaggtaaagtgtaccggaacacagaacagtaaatgttcgtgtcttcctggttggtattgcgctactgattcttcacagactgaagattgtcgagattgtataccaaaaaggagatgtccatgcggatactttggtggaatagatgaacaaggaaatcctatttgtaaatcgtgttgtgttggtgaatattgcgactacctacgtaattatagacttgatccatttcctccatgcaaactatctaaatgtaattaattatgattttgatgataatgttaccatacattatatcgctacttggttagtgtattattcagtatgaagacctattaataattacttatcttttgacgatcttgttataattataatataaaaatacttatggcatagtaactcataattgctgacgcgataaattcgtaataatctgttttgttcaaatttttataaggaatctacaggcataaaaataaaaatataatttataatatactcttacagcgcgccatcatgaataacagcagtgaattgattgctgttattaatggatttagaaatagtggacgattttgtgatattaatatagttattaatgatgaaaggataaacgctcacagactcatcctatctggagcctccgaatatttttccattctgttttccaataattttatcgattctaatgaatacgaagttaatctaagtcatttagattatcaaagtgttaacgatttgatcgattacatttatgggatacctttgagcctaactaacgataacgtgaaatatattctttcaaccgctgattttttacaaattggatctgctattacggagtgtgaaaattacatacttaaaaatctttgttctagaaactgtatcgatttctacatatacgctgataaatataataacaagaaaatagaatcagcgtcgtttaacacaatattacaaaatattttgagactcatcaacgatgaaaactttaaatacttaacagaggaatcaatgataaaaattttaagcgatgatatgttaaatataaaaaatgaggatttcgccccactaattctcattaaatggttagagagtactcaacaaccatgcaccgtcgagttacttaaatgcctcagaatatcattgctttccccacaagttataaaatcactttatagtcatcgactggttagttcaatctacgaatgtataacattcttaaacaatatagcattcttggatgaatcatttcctagataccatagcatcgagttgatatctatcggtataagtaattcgcatgataagatttccataaactgctacaatcataaaaaaaatacatgggaaatgatatcttcacgtagatataggtgtagtttcgcagtggccgtcctggataatattatctatatgatgggtggatatgatcagtccccgtatagaagttcaaaggttatagcgtacaatacatgtacaaattcttggatatatgatataccagagctaaaatatcctcgttctaattgtgggggactggctgatgacgaatacatttattgtataggcggcatacgcgatcaggattcatcgttgacatctagtattgatagatggaagccatcaaaaccatattggcagaagtatgctaaaatgcgcgaaccaaaatgtgatatgggggttgcgatgttaaacggattaatatatgttataggtggaatcgttaaaggtgacacgtgtaccgacgcactagagagtttatcagaagatggatggatgaagcatcaacgtcttccaataaaaatgtccaatatgtcgacgattgttcatgatggcaagatttatatatctggaggttacaacaatagtagtgtagttaatgtaatatcgaatctagtccttagctataattcgatatatgatgaatggaccaaattatcatcattaaacattcctagaattaatcccgctctatggtcagcgcataataaattatatgtaggaggaggaatatctgatgatgttcgaactaatacatctgagacatacgacaaagaaaaagattgttggacattggataatggtcacgtgttaccacgcaattatataatgtataaatgcgaaccgattaaacataaatatccattggaaaaaacacagtacacgaatgattttctaaagtatttggaaagttttataggtagttgatagaacaaaatacataattttgtaaaaataaatcactttttatactaatatgacacgattaccaatacttttgttactaatatcattagtatacgctacaccttttcctcagacatctaaaaaaataggtgatgatgcaactctatcatgtaatcgaaataatacaaatgactacgttgttatgagtgcttggtataaggagcccaattccattattcttttagctgctaaaagcgacgtcttgtattttgataattataccaaggataaaatatcttacgactctccatacgatgatctagttacaactatcacaattaaatcattgactgctagagatgccggtacttatgtatgtgcattctttatgacatcaactacaaatgacactgataaagtagattatgaagaatactccacagagttgattgtaaatacagatagtgaatcgactatagacataatactatctggatctacacattcaccggaaactagttctaagaaacctgattatatagataattctaattgctcgtcggtattcgaaatcggtacccggggatcagcttgcatgcctgcagcaattcccgaggctgtagccgacgatggtgcgccaggagagttgttgattcattgtttgcctccctgctgcggtttttcaccgaagttcatgccagtccagcgtttttgcagcagaaaagccgccgacttcggtttgcggtcgcgagtgaagatccctttcttgttaccgccaacgcgcaatatgccttgcgaggtcgcaaaatcggcgaaattccatacctgttcaccgacgacggcgctgacgcgatcaaagacgcggtgatacatatccagccatgcacactgatactcttcactccacatgtcggtgtacattgagtgcagcccggctaacgtatccacgccgtattcggtgatgataatcggctgatgcagtttctcctgccaggccagaagttctttttccagtaccttctctgccgtttccaaatcgccgctttggacataccatccgtaataacggttcaggcacagcacatcaaagagatcgctgatggtatcggtgtgagcgtcgcagaacattacattgacgcaggtgatcggacgcgtcgggtcgagtttacgcgttgcttccgccagtggcgcgaaatattcccgtgcaccttgcggacgggtatccggttcgttggcaatactccacatcaccacgcttgggtggtttttgtcacgcgctatcagctctttaatcgcctgtaagtgcgcttgctgagtttccccgttgactgcctcttcgctgtacagttctttcggcttgttgcccgcttcgaaaccaatgcctaaagagaggttaaagccgacagcagcagtttcatcaatcaccacgatgccatgttcatctgcccagtcgagcatctcttcagcgtaagggtaatgcgaggtacggtaggagttggccccaatccagtccattaatgcgtggtcgtgcaccatcagcacgttatcgaatcctttgccacgcaagtccgcatcttcatgacgaccaaagccagtaaagtagaacggtttgtggttaatcaggaactgttcgcccttcactgccactgaccggatgccgacgcgaagcgggtagatatcacactctgtctggcttttggctgtgacgcacagttcatagagataaccttcacccggttgccagaggtgcggattcaccacttgcaaagtcccgctagtgccttgtccagttgcaaccacctgttgatccgcatcacgcagttcaacgctgacatcaccattggccaccacctgccagtcaacagacgcgtggttacagtcttgcgcgacatgcgtcaccacggtgatatcgtccacccaggtgttcggcgtggtgtagagcattacgctgcgatggattccggcatagttaaagaaatcatggaagtaagactgctttttcttgccgttttcgtcggtaatcaccattcccggcgggatagtctgccagttcagttcgttgttcacacaaacggtgatacgtacacttttcccggcaataacatacggcgtgacatcggcttcaaatggcgtatagccgccctgatgctccatcacttcctgattattgacccacactttgccgtaatgagtgaccgcatcgaaacgcagcacgatacgctggcctgcccaacctttcggtataaagacttcgcgctgataccagacgttgcccgcataattacgaatatctgcatcggcgaactgatcgttaaaactgcctggcacagcaattgcccggctttcttgtaacgcgctttcccaccaacgctgatcaattccacagttttcgcgatccagactgaatgcccacaggccgtcgagttttttgatttcacgggttggggtttctacaggacgtaacattctagtcgaggaattcatttatagcatagaaaaaaacaaaatgaaattctactatatttttacatacatatattctaaatatgaaagtggtgattgtgactagcgtagcatcgcttctagacatctatatactatatagtaataccaatactcaagactacgaaactgatacaatctcttatcatgtgggtaatgttctcgatgtcgatagccatatgcccggtagttgcgatatacataaactgatcactaattccaaacccacccgctttttatagtaagtttttcacccataaataataaatacaataattaatttctcgtaaaagtagaaaatatattctaatttattgcacggtaaggaagtagaatcataaagaacagtgacggatccccgatccccgacctgcaggcatgcaagctcgactccggaaccaattactgataatgtagaagatcatacagacaccgtcacatacactagtgatagcattaatacagtaagtgcatcatctggagaatccacaacagacgagactccggaaccaattactgataaagaagatcatacagttacagacactgtctcatacactacagtaagtacatcatctggaattgtcactactaaatcaaccaccgatgatgcggatctttatgatacgtacaatgataatgatacagtaccaccaactactgtaggcggtagtacaacctctattagcaattataaaaccaaggactttgtagaaatatttggtattaccgcattaattatattgtcggccgtggcaattttctgtattacatattatatatataataaacgttcacgtaaatacaaaacagagaacaaagtctagatttttgacttacataaatgtctgggatagtaaaatctatcatattgagcggaccatctggtttaggaaagacagccatagccaaaagactatgggaatatatttggatttgtggtgtcccataccactagatttcctcgtcctatggaacgagaaggtgttgattaccattacgttaacagagaggccatctggaagggaatagccgccggaaactttctagaacatactgagtttttaggaaatatttacggaacttctaaaacagctgtgaatacagcggctattaataatcgtatttgtgtgatggatctaaacatcgacggtgttagaagtcttaaaaatacgtacctaatgccttactcggtgtatataagacctacctctcttaaaatggttgagaccaagcttcgtcgtagaaacactgaagctaacgatgagattcatcgtcgtgtgatgttggcaaaaactgacatggatgaggcaggtgaagccggtctattcgacactattatcattgaagatgatgtgaatttagcatatagtaagttaattcagatactacaggaccgtattagaatgtattttaacactaattagagacttaagacttaaaacttgataattaataatataactcgtttttatatgtgtctatttcaacgtctaatgtattagttaaatattaaaacttaccacgtaaaacttaaaatttaaaatgatatttcattgacagatagatcacacattatgaactttcaaggacttgtgttaactgacaattgcaaaaatcaatgggtcgttggaccattaataggaaaaggtggattcggtagtatttatactactaatgacaataattatgtagtaaaaatagagcccaaagctaacggatcattatttaccgaacaggcattttatactagagtacttaaaccatccgttatcgaagaatggaaaaaatctcacaatataaagcacgtaggtcttatcacgtgcaaggcatttggtctatacaaatccattaatgtggaatatcgattcttggtaattaatagattaggtgcagatctagatgcggtgatcagagccaataataatagactaccaaaaaggtcggtgatgttgatcggaatcgaaatcttaaataccatacaatttatgcacgagcaaggatattctcacggagatattaaagcgagtaatatagtcttagatcaaatagataagaataaattatatctagtggattacggattggtttctaaattcatgtctaatggcgaacatgttccatttataagaaatccaaataaaatggataacggtactctagaatttacacctatagattcgcataaaggatacgttgtatctagacgtggagatctagaaacacttggatattgtatgattagatggttgggaggtatcttaccatggactaagatatctgaaacaaagaattgtgcattagtaagtgccacaaaacagaaatatgttaacaatactgcgactttgttaatgaccagtttgcaatatgcacctagagaattgctgcaatatattaccatggtaaactctttgacatattttgaggaacccaattacgacaagtttcggcacatattaatgcagggtgtatattattaagtgtggtgtttggtcgataaaaattaaaaaataacttaatttattattgatctcgtgtgtacaaccgaaatcatggcgatgttttacgcacacgctctcggtgggtacgacgagaatcttcatgcctttcctggaatatcatcgactgttgccaatgatgtcaggaaatattctgttgtgtcagtttataataacaagtatgacattgtaaaagacaaatatatgtggtgttacagtcaggtgaacaagagatatattggagcactgctgcctatgtttgagtgcaatgaatatctacaaattggaaatccgatccatgatcaagaaggaaatcaaatctctatcatcacatatcgccacaaaaactactatgctctaagcggaatcgggtacgagagtctagacttgtgtttggaaggagtagggattcatcatcacgtacttgaaacaggaaacgctgtatatggaaaagttcaacatgattattctactatcaaagagaaggccaaagaaatgagtgcacttagtccaggacctatcatcgattaccacgtctggataggagattgtatctgtcaagttactgctgtggacgtacatggaaaggaaattatgaaaatgagattcaaaaagggtgcggtgcttccgatcccaaatctggtaaaagttaaacttggggagaatgatacagaaaatctttcttctactatatcggcggcaccatcgaggtaaccacctctctggaagacagcgtgaatcatgtactcatgaaacgtttggaaactatacgccatatgtggtctgttgtatatgatcattttgatattgtgaatggtaaagaatgctgttatgtgcatacgcattcatctaatcaaaatcctataccgagtactgtaaaaacaaatttgtacatgaagactatgggatcatgcattcaaatggattccatggaagctctagagtatcttagcgaactgaaggaatcaggtggatggagtcccagaccagaaatgcaggaatttgaatatccagatggagtggaagacactgaatcaattgagagattggcagaggagttcttcaatagatcagaacttcaggctggtgaatcagtcaaatttggtaattctattaattgttaaacatacatctgtttcagctaagcaactaagaacacgtatacggcagcagcttccttctatactctcatcttttaccaacacaaagggtggatatttgttcattggagttgataataatacacacaaagtatttggattcacggtgggttacgactacctcagactgatagagaatgatatagaaaagcatatcaaaagacttcgtgttgtgcatttctgtgagaagaaagaggacatcaagtacgcgtgtcgattcatcaaggtatataaacctggggatgagactacctcgacatacgtgtgcgctatcaaagtggaaagatgctgttgtgctgtgtttgcagattggccagaatcatggtatatggatactaatggtatcaagaagtattctccagatgaatgggtgtcacatataaaattttaattaatgtaactatagagaacaaataataaggttgtaatatcatatagacaataactaacaattaattagtaactgttatctcttttttaactaaccaactaactatatacctattaatacatcgtaattatagttcttaacatctattaatcattaattcgcttctttaattttttataaactaacattgttaattgaaaagggataacatgttacagaatataaattatatatggatttttttaaaaaggaaatacttgactggagtatatatttatctcttcattatatagcacgcgtgttttccaatttttccacatcccatataatacaggattataatctcgttcgaacatacgagaaagtggataaaacaatagttgattttttatctaggttgccaaatttattccatattttagaatatggggaaaatattctacatatttattctatggatgatgctaatacgaatattataattttttttctagatagagtattaaatattaataagaacgggtcatttatacacaatctcgggttatcatcatccattaatataaaagaatatgtatatcaattagttaataatgatcatccagataataggataagactaatgcttgaaaatggacgtagaacaagacattttttgtcctatatatcagatacagttaatatctatatatgtattttaataaatcatggattttatatagatgccgaagacagttacggttgtacattattacatagatgtatatatcactataagaaatcagaatcagaatcatacaatgaattaattaagatattgttaaataatggatcagatgtagataaaaaagatacgtacggaaacacaccttttatcctattatgtaaacacgatatcaacaacgtggaattgtttgagatatgtttagagaatgctaatatagactctgtagactttaatagatatacacctcttcattatgtctcatgtcgtaataaatatgattttgtaaagttattaatttctaaaggagcaaatgttaatgcgcgtaataaattcggaactactccattttattgtggaattatacacggtatctcgcttataaaactatatttggaatcagacacagagttagaaatagataatgaacatatagttcgtcatttaataatttttgatgctgttgaatctttagattatctattatccagaggagttattgatattaactatcgtactatatacaacgaaacatctatttacgacgctgtcagttataatgcgtataatacgttggtctatctattaaacaaaaatggtgattttgagacgattactactagtggatgtacatgtatttcggaagcagtcgcaaacaacaacaaaataataatggaagtactattgtctaaacgaccatctttgaaaattatgatacagtctatgatagcaattactaaacataaacagcataatgcagatttattgaaaatgtgtataaaatatactgcgtgtatgaccgattatgatactcttatagatgtacagtcgctacagcaatataaatggtatattttaagatgtttcgatgaaatagatatcatgaagagatgttatataaaaaataaaactgtattccaattagttttttgtatcaaagacattaatactttaatgagatacggtaaacatccttctttcgtgaaatgcactagtctcgacgtatacggaagtcgtgtacgtaatatcatagcatctattagatatcgtcagagattaattagtctattatccaagaagctggatcctggagataaatggtcgtgttttcctaacgaaataaaatataaaatattggaaaactttaacgataacgaactatccacatatctaaaaatcttataaacattattaaaatataaaatctaagtaggataaaatcacactacatcattgtttccttttagtgctcgacagtgtatactatttttaacgctcataaataaaaatgaaaacgatttccgttgttacgttgttatgcgtactacctgctgttgtttattcaacatgtactgtacccactatgaataacgctaaattaacgtctaccgaaacatcgtttaatgataaccagaaagttacgtttacatgtgatcagggatatcattctttggatccaaatgctgtctgtgaaacagataaatggaaatacgaaaatccatgcaaaaaaatgtgcacagtttctgattatgtctctgaactatataataaaccgctatacgaagtgaattccaccatgacactaagttgcaacggcgaaacaaaatattttcgttgcgaagaaaaaaatggaaatacttcttggaatgatactgttacgtgtcctaatgcggaatgtcaacctcttcaattagaacacggatcgtgtcaaccagttaaagaaaaatactcatttggggaatatatgactatcaactgtgatgttggatatgaggttattggtgcttcgtacataagttgtacagctaattcttggaatgttattccatcatgtcaacaaaaatgtgatatgccgtctctatctaacggattaatttccggatctacattttctatcggtggcgttatacatcttagttgtaaaagtggttttacactaacggggtctccatcatccacatgtatcgacggtaaatggaatcccatactcccaatatgtgtacgaactaacgaaaaatttgatccagtggatgatggtcccgacgatgagacagatttgagcaaactctcgaaagacgttgtacaatatgaacaagaaatagaatcgttagaagcaacttatcatataatcatagtggcgttgacaattatgggcgtcatatttttaatctccgttatagtattagtttgttcctgtgacaaaaataatgaccaatataagttccataaattgctaccgtaaatataaatccgttaaaataattaataatttaataacaaacaagtatcaaaagattaaagacttatagctagaatcaattgagatgtcttcttcagtggatgttgatatctacgatgccgttagagcatttttactcaggcactattataacaagagatttattgtgtatggaagaagtaacgccatattacataatatatacaggctatttacaagatgcgccgttataccgttcgatgatatagtacgtactatgccaaatgaatcacgtgttaaacaatgggtgatggatacacttaatggtataatgatgaatgaacgcgatgtttctgtaagcgttggcaccggaatactattcatggaaatgtttttcgattacaataaaaatagtatcaacaatcaactaatgtatgatataattaatagcgtatctataattctagctaatgagagatatagaagcgcttttaacgacgatggtatatacatccgtagaaatatgattaacaagttgtacggatacgcatctctaactactattggcacgatcgctggaggtgtttgttattatctgttgatgcatctagttagtttgtataaataattatttcaatatactagttaaaattttaagattttaaatgtataaaaaactaataacgtttttatttgtaataggtgcattagcatcctattcgaataatgagtacactccgtttaataaactgagtgtaaaactctatatagatggagtagataatatagaaaattcatatactgatgataataatgaattggtgttaaattttaaagagtacacaatttctattattacagagtcatgcgacgtcggatttgattccatagatatagatgttataaacgactataaaattattgatatgtataccattgactcgtctactattcaacgcagaggtcacacgtgtagaatatctaccaaattatcatgccattatgataagtacccttatattcacaaatatgatggtgatgagcgacaatattctattactgcagagggaaaatgctataaaggaataaaatatgaaataagtatgatcaacgatgatactctattgagaaaacatactcttaaaattggatctacttatatatttgatcgtcatggacatagtaatacatattattcaaaatatgatttttaaaaatttaaaatatattatcacttcagtgacagtagtcaaataacaaacaacaccatgagatatattataattctcgcagttttgttcattaatagtatacatgctaaaataactagttataagtttgaatccgtcaattttgattccaaaattgaatggactggggatggtctatacaatatatcccttaaaaattatggcatcaagacgtggcaaacaatgtatacaaatgtaccagaaggaacatacgacatatccgcatttccaaagaatgatttcgtatctttctgggttaaatttgaacaaggcgattataaagtggaagagtattgtacgggactatgcgtcgaagtaaaaattggaccaccgactgtaacattgactgaatacgacgaccatatcaatttgtacatcgagcatccgtatgctactagaggtagcaaaaagattcctatttacaaacgcggtgacatgtgtgatatctacttgttgtatacggctaacttcacattcggagattctaaagaaccagtaccatatgatatcgatgactacgattgcacgtctacaggttgcagcatagactttgtcacaacagaaaaagtgtgcgtgacagcacagggagccacagaagggtttctcgaaaaaattactccatggagttcgaaagtatgtctgacacctaaaaagagtgtatatacatgcgcaattagatccaaagaagatgttcccaatttcaaggacaaaatggccagagttatcaagagaaaatttaatacacagtctcaatcttatttaactaaatttctcggtagcacatcaaatgatgttaccacttttcttagcatgcttaacttgactaaatattcataactaatttttattaatgatacaaaaacgaaataaaactgcatattatacactggttaacgcccttataggctctaaccattttcaagatgaggtccctgattatagtccttctgttcccctctatcatctactccatgtctattagacgatgtgagaagactgaagaggaaacatggggattgaaaatagggttgtgtataattgccaaagatttctatcccgaaagaactgattgcagtgttcatctcccaactgcaagtgaaggattgataactgaaggcaatggattcagggatatacgaaacaccgataaattataaaaaaagcaatgtgtccgctgtttccgttaataatactattttcgtaactggcggattattcataaataactctaatagcacgatcgtggttaacaatatggaaaaacttgacatttataaagacaaacaatggtcgattatagaaatgcctatggctagggtatatcacggcattgactcgacatttggaatgttatattttgccggaggtctatccgttaccgaacaatatggtaatttagagaaaaacaacgagatatcttgttacaatcctagaacgaataagtggtttgatatttcatatactatttataagatatccatatcatcattgtgtaaactaaataacgtcttctatgtatttagtaaggacattggatatgtggaaaagtatgatggtgcatggaagttagtacatgatcgtctccccgctataaaggcattatcaacttctccttattgattgaaaatgaaaatataaatagtttttatgtatagcagtattaccctatagttttattgcttactactaacatggatacagatgttacaaatgtagaagatatcataaatgaaatagatagagagaaagaagaaatactaaaaaatgtagaaattgaaaataataaaaacattaacaagaatcatcccaatgaatatattagagaagcactcgttattaataccagtagtaatagtgattccattgataaagaagttatagaatgtatcagtcacgatgtaggaatatagatcatatctactaatttttataatcgatacaaaacataaaaaacaactcgttattacatagcaggcatggaatccttcaagtattgttttgataacgatggcaagaaatggattatcggaaatactttatattctggtaattcaatactctataaggtcagaaaaaatttcactagttcgttctacaattacgtaatgaagatagatcacaaatcacacaagccattgttgtctgaaatacgattctatatatctgtattggatcctttgactatcgacaactggacacgggaacgtggtataaagtatttggctattccagatctgtatggaattggagaaaccgatgattatatgttcttcgttataaagaattcgggaagagtattcgccccaaaggatactgaatcagtcttcgaagcatgcgtcactatgataaacacgttagagtttatacactctcgaggatttacccatggaaaaatagaaccgaggaatatactgattagaaataaacgtctttcactaattgactattctagaactaacaaactatacaagagtggaaactcacatatagattacaacgaggacatgataacttcaggaaatatcaattatatgtgtgtagacaatcatcttggagcaacagtttcaagacgaggagatttagaaatgttgggatattgcatgatagaatggttcggtggcaaacttccatggaaaaacgaaagtagtataaaagtaataaaacaaaaaaaagaatataaaaaatttatagctactttctttgaggactgttttcctgaaggaaatgaacctctggaattagttagatatatagaattagtatacacgttagattattctcaaactcctaattatgacagactacgtaaactgtttatacaagattgaaattatattcttttttttatagagtgtggtagtgttacggatatctaatattaatattagactatctctatcgcgctacacgaccaatatcgattactatggatatcttctatgaaaggagagaatgtatttatttctccagcgtcaatctcgtcagtattgacaatactgtattatggagctaatggatccactgctgaacagctatcaaaatatgtagaaacggaggagaacacggataaggttagcgctcagaatatctcattcaaatccatgaataaagtatatgggcgatattctgccgtgtttaaagattcctttttgagaaaaattggcgataagtttcaaactgttgacttcactgattgtcgcactatagatgcaatcaacaagtgtgtagatatctttactgaggggaaaatcaatccactattggatgaaccattgtctcctagcaattagtgccgtatactttaaagcaaaatggttgacgccattcgaaaaggaatttaccagtgattatcccttttacgtatctccgacggaaatggtagacgtaagtatgatgtctatgtacggcaaggcatttaatcacgcatctgtaaaagaatcattcggcaacttttcaatcatagaactgccatatgttggagatactagtatgatggtcattcttccagacaagattgatggattagaatccatagaacaaaatctaacagatacaaattttaagaaatggtgtgactttatggatgctatgtttatagatgttcacattcccaagtttaaggtaacaggctcgtataatctggtggatactctagtaaagtcaggactgacagaggtgttcggttcaactggagattatagcaatatgtgtaatttagatgtgagtgtcgacgctatgatccacaaaacgtatatagatgtcaatgaagagtatacagaagcagctgcagcaacttctgtactagtggcagactgtgcatcaacaattacaaatgagttctgtgcagatcatccgttcatctatgtgattaggcatgttgatggaaaaattcttttcgttggtagatattgctctccgacaactaattgttaaccattttttttaaaaaaaatagaaaaaacatgtggtattagtgcaggtcgttgttcttccaattgcaattggtaagatgacggccaactttagtacccacgtcttttcaccacagcactgtggatgtgacagactgaccagtattgatgacgtcaaacaatgtttgactgaatatatttattggtcgtcctatgcataccgcaacaggcaatgcgctggacaattgtattccacactcctctcttttagagatgatgcggaattagtgttcatcgacattcgcgagctggtaaaaaatatgccgtgggatgatgtcaaagattgtacagaaatcatccgttgttatataccggatgagcaaaaaaccatcagagagatttcggccatcatcggactttgtgcatatgctgctacttactggggaggtgaagaccatcccactagtaacagtctgaacgcattgtttgtgatgcttgagatgctaaattacgtggattataacatcatattccggcgtatgaattgatgagttgtacatcttgacattttctttcttctcttctccctttcttctcttctcccttcctccctcttctccctttcccagaaacaaacttttttacccactataaaataaaatgagtatactacctattatatttcttcctatatttttttattcttcattcgttcagacttttaacgcgtctgaatgtatcgacaaagggcaatattttgcatcattcatggagttagaaaacgagccagtaatcttaccatgtcctcaaataaatacgctatcatccggatataatatattagatattttatgggaaaaacgaggagcggataatgatagaattataccgatagataatggtagcaatatgctaattctgaacccgacacaatcagactctggtatttatatatgcattaccacgaacgaaacctactgtgacatgatgtcgttaaatttgacaatcgtgtctgtctcagaatcaaatatagatcttatctcgtatccacaaatagtaaatgagagatctactggcgaaatggtatgtcccaatattaatgcatttattgctagtaacgtaaacgcagatattatatggagcggacatcgacgccttagaaataagagacttaaacaacggacacctggaattattaccatagaagatgttagaaaaaatgatgctggttattatacatgtgttttagaatatatatacggtggcaaaacatataacgtaaccagaattgtaaaattagaggtacgggatagaataataccttctactatgcaattaccagatggcattgtaacttcaataggtagtaatttgactattgcatgcagagtatcgttgagacctcccacaacggacaccgacgtcttttggataagtaatggtatgtattacgaagaagatgatggggacggaaacggtagaataagtgtagcaaataaaatctatatgaccgataagagacgtgttattacatcccggttaaacattaatcctgtcaaggaagaagatgctacaacgtttacgtgtatggcgtttactattcctagcatcagcaaaacagttactgttagtataacgtgaatgtatgttgttacatttccatgtcaattgagtttataagaatttttatacattatcttccaacaaacaattgacgaacgtattgctatgattaactcccacgatactatgcatattattaatcattaacttgcagactatacctagtgctattttgacatactcgtgttcttgtgtaattgcggtatctatattattaaagtacgtaaatctagctatagttttattatttaattttagataatataccgtctccttatttttaaaaattgccacatcctttattaaatcatgaatgggaatttctatgtcatcgttagtatattgtgaacaacaagagcagatatctataggaaagggtggaatgcgatacattgatctatgtagttttaaaacacacgcgaactttgaagaatttatataaatcattccatcgatacatccttctatgttgacatgtatatatccaggaattcttttattaatgtcaggaaatgtataaactaaaacattgcccgaaagcggtgcctctatctgcgttatatccgttcttaacttacaaaatgtaaccaatacctttgcatgacttgttttgttcggcaacgttagtttaaacttgacgaatggattaattacaatagcatgatccgcgcatctattaagtttttttactttaacgcccttgtatgtttttacagagactttatctaaatttctagtgcttgtatgtgttataaatataacgggatatagaaccgaatcacctaccttagatacccaattacattttatcagatccagataataaacaaattttgtcgccctaactaattctatattgttatatattttacaattggttatgatatcatgtaataacttggagtctaacgcgcatcgtcgtacgtttatacaattgtgatttagtgtagtatatctacacatgtatttttccgcactatagtattctggactagtgataaaactatcgttatatctgtcttcaatgaactcatcgagatattgctctctgtcatattcatacacctgcataaactttctagacatcttacaatccgtgttattttaggatcatatttacatatttacgggtatatcaaagatgttagattagttaatgggaatcgtctataataatgaatattaaacaattatatgaggacttttaccacaaagcatcataaaaatgagtcgtcgtctgatttatgttttaaatatcaaccgcaaatcaactcataaaatacaagagaatgaaatatatacatattttagtcattgcaatatagaccatacttctacagaacttgattttgtagttaaaaactatgatctaaacagacgacaacctgtaactgggtatactgcactacactgctatttgtataataattactttacaaacgatgtactgaagatattattaaatcatgacgtaaatgtaacgatgaaaaccagtagcggacgtatgcctgtttatatattgcttactagatgttgtaatatttcacatgatgtagtgatagatatgatagacaaagataaaaaccacttattacatagagactattccaacctattactagagtatataaaatctcgttacatgttattgaaggaagaggatatcgatgagaacatagtatccactttattagataagggaatcgatcctaactttaaacaagacggatatacagcgttacattattattatttgtgtctcgcacacgtttataaactaggtgagtgtagaaaaccgataacgataaaaaaggccaagcgaattatttctttgtttatacaacatggagctaatctaaacgcgttagataattgtggtaatacaccattccatttgtatcttagtattgaaatgtgtaataatattcatatgactaaaatgctgttgacttttaatccgaatttcaaaatatgtaataatcatggattaacgcctatactatgttatataacttccgactacatacaacacgatattcttgttatgttaatacatcactatgaaacaaatgttggagaaatgccgatagatgagcgtcgtatgatcgtattcgagtttatcaaaacatattctacacgtccggcagattcgataacttatttgatgaataggtttaaaaatataaatatttatacccgctatgaaggaaagacattattacacgtagcatgtgaatataataatacacaagtaatagattatcttatacgtatcaacggagatataaatgcgttaaccgacaataacaaacacgctacacaactcattatagataacaaagaaaattccccatataccattaattgtttactgtatatacttagatatattgtagataagaatgtgataagatcgttggtggatcaacttccatctctacctatcttcgatataaaatcatttgagaaattcatatcctactgtatacttttagatgacacattttacgataggcacgttaagaatcgcgattctaaaacgtatcgatacgcattttcaaaatacatgtcgtttgataaatacgatggtataataactaaatgtcacgacgaaacaatgttactcaaactgtccactgttctagacactacactatatgcagttttaagatgtcataattcgagaaagttaagaagatacctcaacgagttaaaaaaatataataacgataagtcctttaaaatatattctaatattatgaatgagagataccttaatgtatattataaagatatgtacgtgtcaaaggtatatgataaactatttcctgttttcacagataaaaattgtctactaacattactaccttcagaaattatatacgaaatattatacatgctgacaattaacgatctttataatatatcgtatccacctaccaaagtatagttgtatttttctcatgcgatgtgtgtaaaaaaactgatattatataaatattttagtgccgtataataaagatgacgatgaaaatgatggtacatatatatttcgtatcattattgttattgctattccacagttacgccatagacatcgaaaatgaaatcacagaattcttcaataaaatgagagatactctaccagctaaagactctaaatggttgaatccagcatgtatgttcggaggcacaatgaatgatatagccgctctaggagagccattcagcgcaaagtgtcctcctattgaagacagtcttttatcgcacagatataaagactatgtggttaaatgggagaggctagaaaagaatagacggcgacaggtttctaataaacgtgttaaacatggtgatttatggatagccaactatacatctaaattcagtaaccgtaggtatttgtgcaccgtaactacaaagaatggtgactgtgttcagggtatagttagatctcatattaaaaaacctccttcatgcattccaaaaacatatgaactaggtactcatgataagtatggcatagacttatactgtggaattctttacgcaaaacattataataatataacttggtataaagataataaggaaattaatatcgacgacattaagtattcacaaacgggaaaggaattaattattcataatccagagttagaagatagcggaagatacgactgttacgttcattacgacgacgttagaatcaagaatgatatcgtagtatcaagatgtaaaatacttacggttataccgtcacaagaccacaggtttaaactaatactagatccgaaaatcaacgtaacgataggagaacctgccaatataacatgcactgctgtgtcaacgtcattattgatcgacgatgtactgattgaatgggaaaatccatccggatggcttataggattcgattttgatgtatactctgttttaactagtagaggcggtatcaccgaggcgaccttgtactttgaaaatgttactgaagaatatataggtaatacatataaatgtcgtggacacaactattattttgaaaaaacccttacaactacagtagtattggagtaaatatacaatgcatttttatatacattactgaattattattactgaattattattactgaattattattaattatatcgtatttgtgctatagaatggatgaagatacgcgactatctaggtatttgtatctcaccgatagagaacatataaatgtagactctattaaacagttgtgtaaaatatcagatcctaatgcatgttatagatgtggatgtacggctttacatgagtacttttataattatagatcagtcaacggaaaatacaagtatagatacaacggttactatcaatattattcatctagcgattatgaaaattataatgaatattattatgatagaactggtatgaacagtgagagtgataatatatcaatcaaaacagaatatgaattctatgatgaaacacaagatcaaagtacacaactagtaggttacgacattaaactcaaaaccaatgaggatgattttatggctatgatagatcagtgggtgtccatgattatatagatgaatcaattaataaagtagtatatggaagagagtctcacgtaagatggcgggatatatggcaagaacataatgatggcgtatacagtataggaaaggagtgcatagataatatatacgaagacaaccataccgtagacgaattctacaagatagacagcgtatcagatgtagatgacgcggaacacatatctccgataactaaaaaaccatagaatcagttgatgataatacctacatttctaatcttccgtataccatcaaatacaaaatattcgagcaacaataagtattttttatacctttaaaactgataaataaattttttctagtgatattttggcaagatgagaatcctatttctcatcgctttcatgtatgggtgtgttcactcatatgttaacgcggttgaaaccaaatgtccaaatctagacattgtaacatcttctggagaatttcattgttcaggatgtgtggaacatatgcctgagtttagctatatgtattggttggcaaaggatatgaaatcggacgaggataccaagtttatagaacatctgggtgatggcatcaaagaagatgaaaccgttcgtaccacagatagtggaatcgtcactctacgtaaagtccttcatgtgactgatactaataaatttgataattataggttcacttgtgtcctcgctacgctagatggcatttataaaaagaatgtttgctgaagtagttgtgtgctactatttttatttatgatataatctaatggaattaatttgaattgatatttatccaatactaaagattatattagaatcaaattaatcttttatacgagaaaaaataacgacatacgtcgtcaacaaattaaactttttatttattagttaactagcttatagaacttgctcattgttatgtttctaaaacgggtacggcatataggacaattatccgacgcaccggtttctcttcgtgttctatgccatatattgatgcatgttatgcaaaatatatgagtacacgaatccaataaaccaaagtatctatcgttttgagtaaacaacttcatagcaaattccacattctttttctttacttactctatacacgtcctcgtatttatttagtattttgatgatatccaactcagaaatggttgttgtattattgggtgtatttggagtataggtattattagctatgtaccaatttaccaaccctcttaatattgattgataatcacatcggttatccaattaataactaaattgtagtgtatatatagaccatatatgtttctatttttttgacagttacgtatagtttcagtaagttttgattgttgtattcctgtatctctagataagttagtcatatagtcccttccggcgatacgttttttccaagcccgaaattgattagccaaatgtgtatttatttttgtgatattgatataatatttcggataatgcatactgttagtcttatatcatttggttcatctatgtattgtaatattgttacatgatctatagatgatgtattgattttggcaggatcgaattccatatccgcgactaaacagtgaaaaaaatgtaaatactttttaaattttaaattagtaaaacttttttttattttttatgattccaaaaatactgaatacaaagtcctaaattataaatatggagatcatactaccacaacttattattatgtatacaaggccggtgtaatagatagatatatataattctattacaccggcagacaattaccgaccggtatttgtcgttaccaacataccgtataatatgtaatatacaattccataacccattgacagttgttatacatcaaaattgcaattcttttgattacgatgttataagaatgtagttaattgatgtatgatgttaatgtgtcctctttcctcttataacatcgtaatcaaaaacttttttataatatatacctaataatgtgtcttaatagttctcgtgattcgtcaaacaatcattcttataaaatataataaagcaacgtaaaaacacataaaaataagcgtaactaataagacaatggatatttacgacgataaaggtctacagactattaaactgtttaataatgaatttgattgtataaggaatgacatcagagaattatttaaacatgtaactgattccgatagtatacaacttccgatggaagacaattctgatattatagaaaatatcagaaaaatactatatagacgattaaaaaatgtagaatgtgttgacatcgataacacaataacttttatgaaatacgatccaaatgatgataataagcgtacgtgttctaattgggtacccttaactaataactatatggaatattgtctagtaatatatttggaaacaccgatatgtggaggcaaaataaaattataccaccctacaggaaatataaagtcggataaggatattatgtttgcaaagactctagactttaaatcaacgaaagtgttaactggacgtaaaacaattgccgttctagacatatccgtttcatataatagatcaatgactactattcactacaacgacgacgttgatatagatatacatactgataaaaatggaaaagagttatgttattgttatataacaatagatgatcattacttggttgatgtggaaactataggagttatagtcaatagatctggaaaatgtctgttagtaaataaccatctaggtataggtatcgttaaagataaacgtataagcgatagttttggagatgtatgtatggatacaatatttgacttttctgaagcacgagagttattttcattaactaatgatgataacaggaatatagcatgggacactgataaactagacgatgatacagatatatggactcccgtcacagaagatgattacaaatttctttctagactagtattgtatgcaaaatctcaatcggatactgtatttgactattatgttcttactggtgatacggaaccacccactgtattcattttcaaggtaactagattttactttaatatgccgaaataaaaaatttttgtataatatctagaggtagaggtattgtttagataaatacaaataacatagatacatcgcatacttagcatttttataaatatacataagacatacactttatacatttttgtaaaaatactcataaaaaaatttataaaaattatggcacaaccatatcttgtataggtagtttagttcgtcgagtgaacctataaacagataatagacaacacataataatgcctactaatacaagcataataccgggagatgggatatatgacgttgtagtgtttgggttttctgaacgttgatagtctactaatactacatgctgacatctaatgcctgtataaccatgagagcatctacaatacataccgtcaatatctctagcgtggatacagtcaccgtgtaaacaatatccatctccctctggaccgcataatctgatagctggaatatctgttgtagcgtttgtaatttctggcaatgtcgtttcgatagcgttaccactatcggcgaatgatctgattatcatagcagcgaacaacaacatcagataatttatcaacatttttgatggattctgtgtttatgctgtttctcagtgtgtgtttatgacaagattgggaattttatattattaattcagtaatataaactaataatatattgttaattgtgtaaataatataaaaataacaatacaatattgaatgtgttgctgttaaaaatgtatgtgttaatataatagaataaaataaatgagtatgatcattttagataacgattgattttatcattaccgcttcattcttatattctttgcttacggaacctatatttagaaacatctactaacaattttttatgcttgcattattaatggtatgtaatatgattgattgtgtacgcaataccaatttgttaagtatgaatacggggtacaaacataaattgaaatttaacattatttatttatgatatatatcgttatcgttaggtctataccatggatatctttaaagaactaatcttaaaacaccctgatgaaaatgttttgatttctccagtttccattttatctactttatctattctaaatcatggagcagctggttctacagctgaacaactatcaaaatatatagagaatatgaatgagaatacacccgatgacaataatgatgacatggaggtagatattccgtattgtgcgacactagctaccgcaaataaaatatacggtagcgatagtatcgagttccacgcctccttcctacaaaaaataaaagacgattttcaaactgtaaactttaataatgctaaccaaacaaaggaactaatcaacgaatgggttaagacaatgacaaatggtaaaattaattccttattgactagtccgctatccattaatactcgtatgacagttgttagcgccgtccattttaaagcaatgtggaaatatccattttctaaacatcttacatatacagacaagttttatatttctaagaatatagttaccagcgttgatatgatggtgggtaccgagaataacttgcaatatgtacatattaatgaattattcggaggattctctattatcgatattccatacgagggaaactctagtatggtaattatactaccggacgacatagaaggtatatataacatagaaaaaaatataacagatgaaaaatttaaaaaatggtgtggtatgttatctactaaaagtatagacttgtatatgccaaagtttaaagtggaaatgacagaaccgtataatctggtaccgattttagaaaatttaggacttactaatatattcggatattatgcagattttagcaagatgtgtaatgaaactatcactgtagaaaaatttctacatacgacgtttatagatgttaatgaggagtatacagaagcatcggccgttacaggagtatttacgattaacttttcgatggtatatcgtacgaaggtctacataaaccatccattcatgtacatgattaaagacaccacaggacgtatactttttatagggaaatactgctatccgcaataaatataaacaaatagacttttataaagagtcttcaacgataagtatatcgacatactacttatgctgcgaaagattctgaacgagaacgactatctcaccctcttggatcatatccgcactgctaaatactaaatctccactacactttttatcatcttatgaggaatgattgccttcgtgaaataggaataattagcaccagaatagctatggattattgtggtagagagtgcactattctatgtcgtctactggatgaagatgtgacgtacaaaaaaataaaactagaaattgaaacgtgtcacaacttatcaaaacatatagatagacgaggaaacaatgcgctacattgttacgtctccaataaatgcgatacagacattaagattgttctctcgcggagtcgagagactttgtagaaacaacgaaggattaactccgctaggagtatacagtaagcatagatacgtaaaatctcagattgtgcatctactgatatccagctattcaaattcctctaacgaactcaagtcgaatataaatgatttcgatctgtattcggataatatcgacttacgtctgctaaaatacctaattgtggataaacggatacgtccgtccaagaatacgaattatgcaatcaatggtctcggattggtggatatatacgtaacgacgcctaatccgagaccagaagtattgctatggcttcttaaatcagaatgttacagcaccggttacgtatttcgtacctgtatgtacgacagtgatatgtgtaagaactctcttcattactatatatcgtctcatagagaatctcaatctctatccaaggatgtaattaaatgtttgatcgataacaatgtttccatccatggcagagacgaaggaggatctttacccatccaatactactggtctttctcaaccatagatatagagattgttaaattattattaataaaggatgtggacacgtgtagagtatacgacgtcagccctatattagaggcgtattatctaaacaagcgatttagagtaaccccatataatgtagacatggaaatcgttaatcttcttattgagagacgtcatactcttgtcgacgtaatgcgtagtattacttcgtacgattccagagaatataaccactacatcatcgataacattctaaagagatttagacaacaggatgaatccatcgtacaagccatactgataaactacttacattacggcgatatggtcgttcgatgcatgttagataacggacaacaactatcctctacacgactactttgttaataataatctcgtcgatgtaaacgtcgtaaggtttatcgtggaaaatatggacacgcggctgtaaatcacgtatcgaacaatggccgtctatgtatgtacggtctgatattatcgagatttaataattgcgggtatcactgttatgaaaccatactgatagatgtatttgatatactaagcaagtacatggatgatatagatatgatcgataactctactatattacgcggtcgatgtcaataatatacaatttgcaaagcggttattggaatatggagcgagtatcacgctcgataatcaatacggccatccagaaaagcagttacagaagagaaaacaaaacgaaatcgttgttctacaagatgtctctccctacgacgattactacgtaaaaaagatactagcctactgcctattaagggacgagtcattcgcggaactacatagtaaattctgtttaaacgaggactataaaagtgtatttatgaaaaatatatcattcgataagatagattccatcatcgtgacataagtcgcctcaaagagattcgaatctccgacaccgacctgtatacggtatcacagctatcttaaagccatacattcagacagtcacatttcatttcccatgtacgacgatctcatagaacagtgccatctatcgatggagcgtaaaagtaaactcgtcgacaaagcactcaataaattagagtctaccatcggtcaatctagactatcgtatttgcctccggaaattatgcgcaatatcatctaaacagtatgttgtacggaaagaaccattacaaatattatccatgatagaaagaaaatatctatatgattggagaagtaggaaacaggaacaagacaacgattactacattattaaatcatgaagtccgtattatactcgtatatattgtttctctcatgtataataataaacggaagagatatagcaccgcatgcaccatccgatggaaagtgtaaagacaacgaatacaaacgccataatttgtgtccgggaacatacgcttccagattatgcgatagcaagactaacacacgatgtacgccgtgtggttcgggtaccttcacatctcgcaataatcatttacccgcttgtctaagttgtaacggaagacgcgatcgtgtaacacgactcacaatagaatctgtgaatgctctcccggatattattgtcttctcaaaggatcatccggatgcaaggcatgtgtttcccaaacaaaatgtggaataggatacggagtatccggagacgtcatctgttctccgtgtggtctcggaacatattctcacaccgtctcttccgcagataaatgcgaacccgtacccagaaatacgtttaactatatcgatgtggaaattaacctgtatccagttaacgacacgtcgtgtactcggacgaccactaccggtctcagcgaatccatctcaacgtcggaactaactattactatgaatcataaagactgtaatcccgtatttcgtgatggatacttctccgttcttaataaggtagcgacttcaggtttctttacaggagaaaggtgtgcactctgaatttcgagattaaatgcaataacaaagattcttcctccaaacagttaacgaaagcaaagaatgatactatcatgccgcattcggagacagtaactctagtgggcgacatctatatactatatagtaataccaatactcaagactacgaaactgatacaatctcttatcatgtgggtaatgttctcgatgtcgatagccatatgcccggtagttgcgatatacataaactgatcactaattccaaacccacccactttttatagtaagtttttcacccataaataataaatacaataattaatttctcgtaaaagtagaaaatatattctaatttattgcacggtaaggaagtagaatcataaagaacagtactcaatcaatagcaattatgaaacaatatatcgtcctggcatgcatgtgcctggcggcagctgctatgcctgccagtcttcagcaatcatcctcatcctcctcctcgtgtacggaagaagaaaacaaacatcatatgggaatcgatgttattatcaaagtcacaaagcaagaccaaacaccgaccaatgataagatttgccaatccgtaacggaaattacagagtccgagtcagatccagatcccgaggtggaatcagaagatgattccacatcagtcgaggatgtagatcctcctaccacttattactccatcatcggtggaggtctgagaatgaactttggattcaccaaatgtcctcagattaaatccatctcagaatccgctgatggaaacacagtgaatgctagattgtccagcgtgtccccaggacaaggtaaggactctcccgcgatcactcatgaagaagctcttgctatgatcaaagactgtgaagtgtctatcgacatcagatgtagcgaagaagagaaagacagcgacatcaagacccatccagtactcgggtctaacatctctcataagaaagtgagttacgaagatatcatcggttcaacgatcgtcgatacaaaatgcgtcaagaatctagagtttagcgttcgtatcggagacatgtgcaaggaatcatctgaacttgaggtcaaggatggattcaagtatgtcgacggatcggcatctgaaggtgcaaccgatgatacttcactcatcgattcaacaaaactcaaagcgtgtgtctgaatcgataactctattcatctgaaattggatgagtagggttaatcgaacgattcaggcacaccacgaattaaaaaagtgtaccggacactatattccggtttgcaaaacaaaaatgttcttaactacattcacaaaaagttacctctcgcgacttcttctttttctgtctcaatagtgtgatacgattatgacactattcctattcctattcctatttcctttcagagtatcacaaaaatattaaacctctttctgatggtctcataaaaaaagttttacaaaaatatttttattctctttctctctttgatggtctcataaaaaaagttttacaaaaatatttttattctctttctctctttgatggtctcataaaaaaagttttacaaaaatatttttattctctttctctctttgatggtctcataaaaaaagttttacaaaaatatttttattctctttctctctttgatggtctcataaaaaaagttttacaaaaatatttttattctctttctctctttgatggtctcataaaaaaagttttacaaaaatatttttattctctttctctctttgatggtctcataaaaaaagttttacaaaaatatttttattctctttctctctttgatggtctcataaaaaaagttttacaaaaatatttttattctctttctctctttgatggtctcataaaaaaagttttacaaaaatatttttattctctttctctctttgatggtctcataaaaaaagttttacaaaaatatttttattctctttctctctttgatggtctcataaaaaaagttttacaaaaatatttttattctctttctctctttgatggtctcataaaaaaagttttacaaaaatatttttattctctttctctctttgatggtctcataaaaaagttttacaaaaatatttttattctctttctctctttgatggtctcataaaaaagttttacaaaaatatttttattctctttctctctttgatggtctcataaaaaaagttttacaaaaatatttttattctctttctctctttgatggtctcataa

SEQ ID NO: 214 - DNA, 196195 bp, Artificial Sequence
  GLV-1h460
ttatgagaccatcaaagagagaaagagaataaaaatatttttgtaaaactttttttatgagaccatcaaagagagaaagagaataaaaatatttttgtaaaacttttttatgagaccatcaaagagagaaagagaataaaaatatttttgtaaaacttttttatgagaccatcaaagagagaaagagaataaaaatatttttgtaaaactttttttatgagaccatcaaagagagaaagagaataaaaatatttttgtaaaactttttttatgagaccatcaaagagagaaagagaataaaaatatttttgtaaaactttttttatgagaccatcaaagagagaaagagaataaaaatatttttgtaaaactttttttatgagaccatcaaagagagaaagagaataaaaatatttttgtaaaactttttttatgagaccatcaaagagagaaagagaataaaaatatttttgtaaaactttttttatgagaccatcaaagagagaaagagaataaaaatatttttgtaaaactttttttatgagaccatcaaagagagaaagagaataaaaatatttttgtaaaactttttttatgagaccatcaaagagagaaagagaataaaaatatttttgtaaaactttttttatgagaccatcaaagagagaaagagaataaaaatatttttgtaaaactttttttatgagaccatcaaagagagaaagagaataaaaatatttttgtaaaactttttttatgagaccatcaaagagagaaagagaataaaaatatttttgtaaaactttttttatgagaccatcagaaagaggtttaatatttttgtgatactctgaaaggaaataggaataggaataggaatagtgtcataatcgtatcacactattgagacagaaaaagaagaagtcgcgagaggtaactttttgtgaatgtagttaagaacatttttgttttgcaaaccggaatatagtgtccggtacacttttttaattcgtggtgtgcctgaatcgttcgattaaccctactcatccaatttcagatgaatagagttatcgattcagacacacgctttgagttttgttgaatcgatgagtgaagtatcatcggttgcaccttcagatgccgatccgtcgacatacttgaatccatccttgacctcaagttcagatgattccttgcacatgtctccgatacgaacgctaaactctagattcttgacgcattttgtatcgacgatcgttgaaccgatgatatcttcgtaactcactttcttatgagagatgttagacccgagtactggatgggtcttgatgtcgctgtctttctcttcttcgctacatctgatgtcgatagacacttcacagtctttgatcatagcaagagcttcttcatgagtgatcgcgggagagtccttaccttgtcctggggacacgctggacaatctagcattcactgtgtttccatcagcggattctgagatggatttaatctgaggacatttggtgaatccaaagttcattctcagacctccaccgatgatggagtaataagtggtaggaggatctacatcctcgactgatgtggaatcatcttctgattccacctcgggatctggatctgactcggactctgtaatttccgttacggattggcaaatcttatcattggtcggtgtttggtcttgctttgtgactttgataataacatcgattcccatatgatgtttgttttcttcttccgtacacgaggaggaggatgaggatgattgctgaagactggcaggcatagcagctgccgccaggcacatgcatgccaggacgatatattgtttcataattgctattgattgagtactgttctttatgattctacttccttaccgtgcaataaattagaatatattttctacttttacgagaaattaattattgtatttattatttatgggtgaaaaacttactataaaaagtgggtgggtttggaattagtgatcagtttatgtatatcgcaactaccgggcatatggctatcgacatcgagaacattacccacatgataagagattgtatcagtttcgtagtcttgagtattggtattactatatagtatatagatgtcgcccactagagttactgtctccgaatgcggcatgatagtatcattctttgctttcgttaactgtttggaggaagaatctttgttattgcatttaatctcgaaattcagagtgcacacctttctcctgtaaagaaacctgaagtcgctaccttattaagaacggagaagtatccatcacgaaatacgggattacagtctttatgattcatagtaatagttagttccgacgttgagatggattcgctgagaccggtagtggtcgtccgagtacacgacgtgtcgttaactggatacaggttaatttccacatcgatatagttaaacgtatttctgggtacgggttcgcatttatctgcggaagagacggtgtgagaatatgttccgagaccacacggagaacagatgacgtctccggatactccgtatcctattccacattttgtttgggaaacacatgccttgcatccggatgatcctttgagaagacaataatatccgggagagcattcacagattctattgtgagtcgtgttacacgatcgcgtcttccgttacaacttagacaagcgggtaaatgattattgcgagatgtgaaggtacccgaaccacacggcgtacatcgtgtgttagtcttgctatcgcataatctggaagcgtatgttcccggacacaaattatggcgtttgtattcgttgtctttacactttccatcggatggtgcatgcggtgctatatctcttccgtttattattatacatgagagaaacaatatatacgagtataatacggacttcatgatttaataatgtagtaatcgttgtcttgttcctgtttcctacttctccaatcatatagatattttctttctatcatggataatatttgtaatggttctttccgtacaacatactgtttagatgatattgcgcataatttccggaggcaaatacgatagtctagattgaccgatggtagactctaatttattgagtgctttgtcgacgagtttacttttacgctccatcgatagatggcactgttctatgagatcgtcgtacatgggaaatgaaatgtgactgtctgaatgtatggctttaagatagctgtgataccgtatacaggtcggtgtcggagattcgaatctctttgaggcgacttatgtcacgatgatggaatctatcttatcgaatgatatatttttcataaatacacttttatagtcctcgtttaaacagaatttactatgtagttccgcgaatgactcgtcccttaataggcagtaggctagtatcttttttacgtagtaatcgtcgtagggagagacatcttgtagaacaacgatttcgttttgttttctcttctgtaactgcttttctggatggccgtattgattatcgagcgtgatactcgctccatattccaataaccgctttgcaaattgtatattattgacatcgaccgcgtaatatagtagagttatcgatcatatctatatcatccatgtacttgcttagtatatcaaatacatctatcagtatggtttcataacagtgatacccgcaattattaaatctcgataatatcagaccgtacatacatagacggccattgttcgatacgtgatttacagccgcgtgtccatattttccacgataaaccttacgacgtttacatcgacgagattattattaacaaagtagtcgtgtagaggatagttgttgtccgttatctaacatgcatcgaacgaccatatcgccgtaatgtaagtagtttatcagtatggcttgtacgatggattcatcctgttgtctaaatctctttagaatgttatcgatgatgtagtggttatattctctggaatcgtacgaagtaatactacgcattacgtcgacaagagtatgacgtctctcaataagaagattaacgatttccatgtctacattatatggggttactctaaatcgcttgtttagataatacgcctctaatatagggctgacgtcgtatactctacacgtgtccacatcctttattaataataatttaacaatctctatatctatggttgagaaagaccagtagtattggatgggtaaagatcctccttcgtctctgccatggatggaaacattgttatcgatcaaacatttaattacatccttggatagagattgagattctctatgagacgatatatagtaatgaagagagttcttacacatatcactgtcgtacatacaggtacgaaatacgtaaccggtgctgtaacattctgatttaagaagccatagcaatacttctggtctcggattaggcgtcgttacgtatatatccaccaatccgagaccattgattgcataattcgtattcttggacggacgtatccgtttatccacaattaggtattttagcagacgtaagtcgatattatccgaatacagatcgaaatcatttatattcgacttgagttcgttagaggaatttgaatagctggatatcagtagatgcacaatctgagattttacgtatctatgcttactgtatactcctagcggagttaatccttcgttgtttctacaaagtctctcgactccgcgagagaacaatcttaatgtctgtatcgcatttattggagacgtaacaatgtagcgcattgtttcctcgtctatctatatgttttgataagttgtgacacgtttcaatttctagttttatttttttgtacgtcacatcttcatccagtagacgacatagaatagtgcactctctaccacaataatccatagctattctggtgctaattattcctatttcacgaaggcaatcattcctcataagatgataaaaagtgtagtggagatttagtatttagcagtgcggatatgatccaagagggtgagatagtcgttctcgttcagaatctttcgcagcataagtagtatgtcgatatacttatcgttgaagactctttataaaagtctatttgtttatatttattgcggatagcagtatttccctataaaaagtatacgtcctgtggtgtctttaatcatgtacatgaatggatggtttatgtagaccttcgtacgatataccatcgaaaagttaatcgtaaatactcctgtaacggccgatgcttctgtatactcctcattaacatctataaacgtcgtatgtagaaatttttctacagtgatagtttcattacacatcttgctaaaatctgcataatatccgaatatattagtaagtcctaaattttctaaaatcggtaccagattatacggttctgtcatttccactttaaactttggcatatacaagtctatacttttagtagataacataccacaccattttttaaatttttcatctgttatatttttttctatgttatatataccttctatgtcgtccggtagtataattaccatactagagtttccctcgtatggaatatcgataatagagaatcctccgaataattcattaatatgtacatattgcaagttattctcggtacccaccatcatatcaacgctggtaactatattcttagaaatataaaacttgtctgtatatgtaagatgtttagaaaatggatatttccacattgctttaaaatggacggcgctaacaactgtcatacgagtattaatggatagcggactagtcaataaggaattaattttaccatttgtcattgtcttaacccattcgttgattagttcctttgtttggttagcattattaaagtttacagtttgaaaatcgtcttttattttttgtaggaaggaggcgtggaactcgatactatcgctaccgtatattttatttgcggtagctagtgtcgcacaatacggaatatctacctccatgtcatcattattgtcatcgggtgtattctcattcatattctctatatattttgatagttgttcagctgtagaaccagctgctccatgatttagaatagataaagtagataaaatggaaactggagaaatcaaaacattttcatcagggtgttttaagattagttctttaaagatatccatggtatagacctaacgataacgatatatatcataaataaataatgttaaatttcaatttatgtttgtaccccgtattcatacttaacaaattggtattgcgtacacaatcaatcatattacataccattaataatgcaagcataaaaaattgttagtagatgtttctaaatataggttccgtaagcaaagaatataagaatgaagcggtaatgataaaatcaatcgttatctaaaatgatcatactcatttattttattctattatattaacacatacatttttaacagcaacacattcaatattgtattgttatttttatattatttacacaattaacaatatattattagtttatattactgaattaataatataaaattcccaatcttgtcataaacacacactgagaaacagcataaacacagaatccatcaaaaatgttgataaattatctgatgttgttgttcgctgctatgataatcagatcattcgccgatagtggtaacgctatcgaaacgacattgccagaaattacaaacgctacaacagatattccagctatcagattatgcggtccagagggagatggatattgtttacacggtgactgtatccacgctagagatattgacggtatgtattgtagatgctctcatggttatacaggcattagatgtcagcatgtagtattagtagactatcaacgttcagaaaacccaaacactacaacgtcatatatcccatctcccggtattatgcttgtattagtaggcattattatgtgttgtctattatctgtttataggttcactcgacgaactaaactacctatacaagatatggttgtgccataatttttataaatttttttatgagtatttttacaaaaatgtataaagtgtatgtcttatgtatatttataaaaatgctaagtatgcgatgtatctatgttatttgtatttatctaaacaatacctctacctctagatattatacaaaaattttttatttcggcatattaaagtaaaatctagttaccttgaaaatgaatacagtgggtggttccgtatcaccagtaagaacataatagtcaaatacagtatccgattgagattttgcatacaatactagtctagaaagaaatttgtaatcatcttctgtgacgggagtccatatatctgtatcatcgtctagtttatcagtgtcccatgctatattcctgttatcatcattagttaatgaaaataactctcgtgcttcagaaaagtcaaatattgtatccatacatacatctccaaaactatcgcttatacgtttatctttaacgatacctatacctagatggttatttactaacagacattttccagatctattgactataactcctatagtttccacatcaaccaagtaatgatcatctattgttatataacaataacataactcttttccatttttatcagtatgtatatctatatcaacgtcgtcgttgtagtgaatagtagtcattgatctattatatgaaacggatatgtctagaacggcaattgttttacgtccagttaacactttcgttgatttaaagtctagagtctttgcaaacataatatccttatccgactttatatttcctgtagggtggtataattttattttgcctccacatatcggtgtttccaaatatattactagacaatattccatatagttattagttaagggtacccaattagaacacgtacgcttattatcatcatttggatcgtatttcataaaagttattgtgttatcgatgtcaacacattctacattttttaatcgtctatatagtatttttctgatattttctataatatcagaattgtcttccatcggaagttgtatactatcggaatcagttacatgtttaaataattctctgatgtcattccttatacaatcaaattcattattaaacagtttaatagtctgtagacctttatcgtcgtaaatatccattgtcttattagttacgcttatttttatgtgtttttacgttgctttattatattttataagaatgattgtttgacgaatcacgagaactattaagacacattattaggtatatattataaaaaagtttttgattacgatgttataagaggaaagaggacacattaacatcatacatcaattaactacattcttataacatcgtaatcaaaagaattgcaattttgatgtataacaactgtcaatgggttatggaattgtatattacatattatacggtatgttggtaacgacaaataccggtcggtaattgtctgccggtgtaatagaattatatatatctatctattacaccggccttgtatacataataataagttgtggtagtatgatctccatatttataatttaggactttgtattcagtatttttggaatcataaaaaataaaaaaaagttttactaatttaaaatttaaaaagtatttacatttttttcactgtttagtcgcggatatggaattcgatcctgccaaaatcaatacatcatctatagatcatgtaacaatattacaatacatagatgaaccaaatgatataagactaacagtatgcattatccgaaatattatatcaatatcacaaaaataaatacacatttggctaatcaatttcgggcttggaaaaaacgtatcgccggaagggactatatgactaacttatctagagatacaggaatacaacaatcaaaacttactgaaactatacgtaactgtcaaaaaaatagaaacatatatggtctatatatacactacaatttagttattaattggataaccgatgtgattatcaatcaatattaagagggttggtaaattggtacatagctaataatacctatactccaaatacacccaataatacaacaaccatttctgagttggatatcatcaaaatactaaataaatacgaggacgtgtatagagtaagtaaagaaaaagaatgtggaatttgctatgaagttgtttactcaaaacgatagatactttggtttattggattcgtgtactcatatattttgcataacatgcatcaatatatggcatagaacacgaagagaaaccggtgcgtcggataattgtcctatatgccgtacccgttttagaaacataacaatgagcaagttctataagctagttaactaataaataaaaagtttaatttgttgacgacgtatgtcgttattttttctcgtataaaagattaatttgattctaatataatctttagtattggataaatatcaattcaaattaattccattagattatatcataaataaaaatagtagcacacaactacttcagcaaacattctttttataaatgccatctagcgtagcgaggacacaagtgaacctataattatcaaatttattagtatcagtcacatgaaggactttacgtagagtgacgattccactatctgtggtacgaacggtttcatcttctttgatgccatcacccagatgttctataaacttggtatcctcgtccgatttcatatcctttgccaaccaatacatatagctaaactcaggcatatgttccacacatcctgaacaatgaaattctccagaagatgttacaatgtctagatttggacatttggtttcaaccgcgttaacatatgagtgaacacacccatacatgaaagcgatgagaaataggattctcatcttgccaaaatatcactagaaaaaatttatttatcagttttaaaggtataaaaaatacttattgttgctcgaatattttgtatttgatggtatacggaagattagaaatgtaggtattatcatcaactgattctatggttttatgtattctatcatgtttcactattgcgttggaaataatatcatatgcttccacatatattttattttgttttaactcataatactcacgtaattctggattattggcatatctatgaataattttagctccatgatcagtaaatattaatgagaacatagtattaccacctaccattatttttttcatctcattcaattcttaattgcaaagatctatataatcattatagcgttgacttatggactctggaatcttagacgatgtacagtcatctataatcatggcatatttaatacattgttttatagcatagtcgttatctacgatgttagatatttctctcaatgaatcaatcacacaatctaatgtaggtttatgacataatagcattttcagcagttcaatgtttttagattcgttgatggcaatggctatacatgtatatccgttatttgatctaatgttgacatctgaaccggattctagcagtaaagatactagagattgtttattatatctaacagccttgtgaagaagtgtttctcctcgtttgtcaatcatgttaatgtctttaagataaggtaggcaaatgtttatagtactaagaattgggcaagcataagacatgtcacaaagacccttttttgtatgtataagtgtaaaaattataacatccatagttggatttacataggtgtccaatcgggatctctccatcatcgagataattgatggcatctcccttccttttttagtagatatttcatcgtgtaagaatcaatattaatatttctaaagtatccgtgtatagcctctttatttaccacagctccatattccactagagggatatcgccgaatgtcatatactcaattagtatatgttggaggacatccgagttcattgttttcaatatcaaagagatggtttccttatcatttctccatagtggtacaatactacacattattccgtgcggctttccattttccaaaaacaatttgaccaaatctaaatctacatctttattgtatctataatcactatttagataatcagccataattcctcgagtgcaacatgttagatcgtctatatatgaataagcagtgttatctattcctttcattaacaatttaacgatgtctatatctatatgagatgacttaatataatattgaagagctgtacaatagtttttatctataaaagacggcttgattccgtgattaattagacatttaacaacttccggacgcacatatgctctcgtatccgactctgaatacagatgagagatgatatacagatgcaatacggtaccgcaatttcgtagttgataatcatcatacgcgtatcagtactcgtcctcataaagaacactgcagccattttctatgaacaaatcaataattttagaaacaggatcattgtcattacataattttctataactgaacgatggttttcacatttaacactcaagtcaaatccatgttctaccaacacctttatcaagtcaacgtctacatttttggatttcatatagctgaatatattaaagttatttatgttgctaaatccagtggcttctagtagagccatcgctatatccttattaactttaacatgtctactatttgtgtattcttctaatggggtaagctgtctccaatttttgcgtaatggattagtgccactgtctagtagtagtttgacgacctcgacattattacaatgctcattaaaaaggtatgcgtgtaaagcattattcttgaattggttcctggtatcattaggatctctgtctttcaacatctgtttaagttcatcaagagccacctcctcattttccaaatagtcaaacattttgactgaatgagctactgtgaactctatacacccacacaactaatgtcattaaatatcatgtcaaaaacttgtacaattattaataaaaataatttagtgtttaaattttaccagttccagattttacacctccgttaatacctccattaaccccactggacgatcctcctccccacattccaccgccaccagatgtataagttttagatcctttattactaccatcatgtccatggataaagacactccacatgccgccactaccccctttagaagacatattaataagacttaaggacaagtttaacaataaaattaatcacgagtaccctactaccaacctacactattatatgattatagtttctatttttacagtaccttgactaaagtttctagtcacaagagcaatactaccaacctacactattatatgattatagtttctatttttataggaacgcgtacgagaaaatcaaatgtctaatttctaacggtagtgttgataaacgattgttatccgcggatacctcctctatcatgtcgtctattttcttactttgttctattaacttattagcattatatattatttgattataaaacttatattgcttattagcccaatctgtaaatatcggattattaacatatcgtttctttgtaggtttatttaacatgtacatcactgtaagcatgtccttaccatttattttaatttgacgcatatccgcaatttctttttcgcagtcggttataaattctatatatgatggatacatgctacatgtgtacttataatcgactaatatgaagtacttgatacatattttcagtaacgatttattattaccacctatgaataagtacctgtgatcgtctaggtaatcaactgttttcttaatacattcgatggttggtaatttactcagaataatttccaatatcttaatatataattctgctatttctgggatatatttatctgccagtataacacaaatagtaatacatgtaaacccatattttgttattatattaatgtctgcgccattatctattaaccattctactaggctgacactatgcgactcaatacaatgataaagtatactacatccatgtttatctattttgtttatatcatcaatatacggcttacaaagttttagtatcgataacacatccaactcacgcatagagaaggtagggaataatggcataatatttattaggttatcatcattgtcattatctacaactaagtttccattttttaaaatatactcgacaactttaggatctctattgccaaatttttgaaaatatttatttatatgcttaaatctatataatgtagctccttcatcaatcatacatttaataacattgatgtatactgtatgataagatacatattctaacaatagatcttgtatagaatctgtatatcttttaagaattgtggatattaggatattattacataaactattacacaattctaaaatataaaacgtatcacggtcgaataatagttgatcaactatataattatcgattttgtgatttttcttcctaaactgtttacgtaaatagttagatagaatattcattagttcatgaccactatagttactatcgaataacgcgtcaaatatttcccgtttaatatcgcatttgtcaagataataatagagtgtggtatgttcacgataagtataataacgcatctctttttcgtgtgaaattaaatagtttattacgtccaaagatgtagcataaccatcttgtgacctagtaataatataataatagagaactgttttacccattctatcatcataatcagtggtgtagtcgtaatcgtaatcgtctaattcatcatcccaattataatattcaccagcacgtctaatctgttctattttgatcttgtatccatactgtatgttgctacatgtaggtattcctttatccaataatagtttaaacacatctacattgggatttgatgttgtagcgtatttttctacaatattaataccatttttgatactatttatttctatacctttcgaaattagtaatttcaataagtctatattgatgttatcagaacatagatattcgaatatatcaaaatcattgatatttttatagtcgactgacgacaataacaaaatcacaacatcgtttttgatattattatttttcttggtaacgtatgcctttaatggagtttcaccatcatactcatataatggatttgcaccactttctatcaatgattgtgcactgctggcatcgatgttaaatgttttacaactatcatagagtatcttatcgttaaccatgattggttgttgatgctatcgcattttttggtttctttcatttcagttatgtatggatttagcacgtttgggaagcatgagctcatatgatttcagtactgtagtgtcagtactattagtttcaataagatcaatctctagatctatagaatcaaaacacgataggtcagaagataatgaatatctgtaggcttcttgttgtactgtaacttctggttttgttagatggttgcatcgtgctttaacgtcaatggtacaaattttatcctcgctttgtgtatcatattcgtccctactataaaattgtatattcagattatcatgcgatgtgtatacgctaacggtatcaataaacggagcacaccatttagtcataaccgtaatccaaaaatttttaaagtatatcttaacgaaagaagttgtgtcattgtctacggtgtatggtactagatcctcataagtgtatatatctagagtaatgtttaatttattaaatggttgataatatggatcctcgtgacaatttccgaagatggaaataagacataaacacgcaataaatctaattgcggacatggttactccttaaaaaaatacgaataatcaccttggctatttagtaagtgtcatttaacactatactcatattaatccatggactcataatctctatacgggattaacggatgttctatatacggggatgagtagttctcttctttaactttatactttttactaatcatatttagactgatgtatgggtaatagtgtttgaagagctcgttctcatcatcagaataaatcaatatctctgtttttttgttatacagatgtattacagcctcatatattacgtaatagaacgtgtcatctaccttattaactttcaccgcatagttgtttgcaaatacggttaatcctttgacctcgtcgatttccgaccaatctgggcgtataatgaatctaaactttaattgcttgtaatcattcgaaataatttttagtttgcatccgtagttatcccctttatgtaactgtaaatttctcaacgcgatatctccattaataatgatgtcgaattcgtgctgtatacccatactgaatggatgaacgaataccgacggcgttaatagtaatttactttttcatctttacatattgggtactagttttactatcataagtttataaattccacaagctactatggaataagccaaccatcttagtataccacacatgtcttaaagtttattaattaattacatgttgttttatatatatcgctacgaatttaaagagaaattagtttaggaagaaaaattatctatctacatcatcacgtctctgtattctacgatagagtgctactttaagatgcgacagatccgtgtcatcaaatatatactccattaaaatgattattccggcagcgaacttgatattggatatatcacaacctttgttaatatctacgacaatagacagcagtcccatggttccataaacagtgagtttatctttctttgaagagatattttgtagagatcttataaaactgtcgaatgacatcgcatttatatctttagctaaatcgtatatgttaccatcgtaatatctaaccgcgtctatcttaaacgtttccatcgctttaaagacgtttccgatagatggtctcatttcatcagtcatactgagccaacaaatataatcgtgtataacatctttgatagaatcagactctaaagaaaacgaatcggctttattatacgcattcatgataaacttaatgaaaaatgtttttcgttgtttaagttggatgaatagtatgtcttaataattgttattatttcattaattaatatttagtaacgagtacactctataaaaacgagaatgacataactaatcataactagttatcaaagtgtctaggacgcgtaattttcatatggtatagatcctgtaagcattgtctgtattctggagctattttctctatcgcattagtgagttcagaatatgttataaatttaaatcgaataacgaacataactttagtaaagtcgtctatattaactcttttattttctagccatcgtaataccatgtttaagatagtatattctctagttactacgatctcatcgttgtctagaatatcacatactgaatctacatccaattttagaaattggtctgtgttacatatctcttctatattattgttgatgtattgtcgtagaaaactattacgtagaccattttctttataaaacgaatatatagtactccaattatctttaccgatatatttgcacacataatccattctctcaatcactacatctttaagattttcgttgttaagatatttggctaaactatataattctattagatcatcaacagaatcagtatatatttttctagatccaaagacgaactctttggcgtcctctataatattcccagaaaagatattttcgtgttttagtttatcgagatctgatctgttcatatacgccatgattgtacggtacgttatgataaccgcataaaataaaaatccattttcatttttaaccaatactattcataattgagattgatgtaatactttgttactttgaacgtaaagacagtacacggatccgtatctccaacaagcacgtagtaatcaaatttggtgttgttaaacttcgcaatattcatcaatttagatagaaacttatactcatcatctgttttaggaatccatgtattattaccactttccaacttatcattatcccaggctatgtttcgtccatcatcgttgcgcagagtgaataattcttttgtattcggtagttcaaatatatgatccatgcatagatcggcaaagctattgtagatgtgatttttcctaaatctaatataaaactcgtttactagcaaacactttcctgatttatcgaccaagacacatatggtttctaaatctatcaagtggtggggatccatagttatgacgcagtaacatatattattacattcttgactgtcgctaatatctaaatatttattgttatcgtattggattctgcatatagatggcttgtatgtcaaagatatagaacacataaccaatttatagtcgcgctttacattctcgaatctaaagttaagagatttagaaaacattatatcctcggatgatgttatcactgtttctggagtaggatatattaaagtctttacagatttcgtccgattcaaataaatcactaaataatatcccacattatcatctgttagagtagtatcattaaatctattatattttatgaaagatatatcactgctcacctctatatttcgtacatttttaaactgtttgtataatatctctctgatacaatcagatatatctattgtgtcggtagacgataccgttacatttgaattaatggtgttccattttacaacttttaacaagttgaccaattcatttctaatagtatcaaactctccatgattaaatattttaatagtatccattttatatcactacggacacaaagtagctgacataaaccattgtataatttttatgttttatgtttattagcgtacacattttggaagttccggcttccatgtatttcctggagagcaagtagatgatgaggaaccagatagtttatatccgtacttgcacttaaagtctacattgtcgttgtatgagtatgatcttttaaacccgctagacaagtatccgtttgatattgtaggatgtggacatttaacaatctgacacgtgggtggatcggaccattctcctcctgaacacaggacactagagttaccaatcaacgaatatccactattgcaactataagttacaacgctcccatcggtataaaaatcctcgtatccgttatgtcttccgttggatatagatggaggggattggcatttaacagattcacaaataggtgcctcgggattccataccatagatccagtagatcctaattcacaatacgatttagattcaccgatcaactgatatccgctattacaagagtacgttatactagagccaaagtctactccaccaatatcaagttggccattatcgatatctcgaggcgatgggcatctccgtttaatacattgattaaagagtgtccatccagtacctgtacatttagcatatataggtcccattttttgctttctgtatccaggtagacatagatattctatagtgtctcctatgttgtaattagcattagcatcagtctccacactattcttaaatttcatattaatgggtcgtgacggaatagtacagcatgatagaacgcatcctattcccaacaatgtcaggaacgtcacgctctccaccttcatatttatttatccgtaaaaatgttatcctggacatcgtacaaataataaaaagcccatatatgttcgctattgtagaaattgtttttcacagttgctcaaaaacgatggcagtgacttatgagttacgttacactttggagtctcatctttagtaaacatatcataatattcgatattacgagttgacatatcgaacaaattccaagtatttgattttggataatattcgtattttgcatctgctataattaagatataatcaccgcaagaacacacgaacatctttcctacatggttaaagtacatgtacaattctatccatttgtcttccttaactatatatttgtatagataattacgagtctcgtgagtaattccagtaattacatagatgtcgccgtcgtactctacagcataaactatactatgatgtctaggcatgggagacttttttatccaacgatttttagtgaaacattccacatcgtttaatactacatatttctcatacgtggtataaactccacccattacatatatatcatcgtttacgaataccgacgcgcctgaatatctaggagtaattaagtttggaagtcttatccatttcgaagtgccgtgtttcaaatattctgccacacccgttgaaatagaaaattctaatcctcctattacatataactttccatcgttaacacaagtactaacttctgattttaacgacgacatattagtaaccgttttccattttttcgttttaagatctacccgcgatacggaataaacatgtctattgttaatcatgccgccaataatgtatagacaattatgtaaaacatttgcattatagaattgtctatctgtattaccgactatcgtccaatattctgttctaggagagtaatgggttattgtggatatataatcagagtttttaatgactactatattatgttttataccatttcgtgtcactggctttgtagatttggatatagttaatcccaacaatgatatagcattgcgcatagtattagtcataaacttgggatgtaaaatgttgatgatatctacatcgtttggatttttatgtatccactttaataatatcatagctgtaacatcctcatgatttacgttaacgtcttcgtgggataagatagttgtcagttcatcctttgataattttccaaattctggatcggatgtcaccgcagtaatattgttgattatttctgacatcgacgcattatatagttttttaattccatatcttttagaaaagttaaacatccttatacaatttgtgaaattaatattatgaatcatagtttttacacatagatctactacaggcggaacatcaattattatggcagcaactagtatcatttctacattgtttatggtgatgtttatcttcttccagcgcatatagtctaatagcgattcaaacgcgtgatagtttataccattcaatataatcgcttcatcctttagatggtgatcctgaatgcgtttaaaaaaattatacggagacgccgtaataatttccttattcacttgtataatttccccattgatagaaaatattacgctttccattcttaaagtactataagtaattatagtataatgtaaacgtttatatattcaatatttttataaaaatcattttgacattaattcctttttaaatttccgtctatcatctatagaaacgtattctatgaatttataaaatgcttttacgtgtcctatcgtaggcgatagaaccgctaaaaagcctatcgaatttctacaaaagaatctgttatatggtatagggagagtataaaacattaaatgtccgtacttattaaagtattcagtagccaatcctaactctttcgaatacttattaatggctcttgttctgtacgaatctatttttttgaacaacggacctagtggtatatcttgttctatgtatctaaaataatgtctgactagatccgttagtttaatatccgcagtcatcttgtctagaatggcaaatctaactgcgggtttaggctttagtttagtttctatatctacatctatgtctttatctaacaccaaaaatataatagctaatattttattacaatcatccggatattcttctacgatctcactaactaatgtttctttggttatactagtatagtcactatcggacaaataaagaaaatcagatgatcgatgaataatacatttaaattcatcatctgtaagatttttgagatgtctcattagaatattattagggttagtactcattatcattcggcagctattacttattttattatttttcaccatatagatcaatcattagatcatcaaaatatgtttcaatcatcctaaagagtatggtgaatgactcttcccatctaatttctgaacgttcaccaatgtctctagccactttggcactaatagcgatcattcgcttagcgtcttctatattattaactggttgatttaatctatctagcaatggaccgtcggacagcgtcattctcatgttcttaatcaatgtacatacatcgccgtcatctaccaattcatccaacaacataagctttttaaaatcatcattataataggtttgatcgttgtcatttctccaaagaatatatctaataagtagagtcctcatgcttagttaacaactattttttatgttaaatcaattagtacaccgctatgtttaatacttattcatattttagtttttaggattgagaatcaatacaaaaattaatgcatcattaattttagaaatacttagtttccacgtagtcaatgaaacatttgaactcatcgtacaggacgttctcgtacaggacgtaactataaaccggtttatatttgttcaagatagatacaaatccgataactttttttacgaattctacgggatccactttaaaagtgtcataccgggttctttttatttttttaaacagatcaatggtgtgatgttgattaggtcttttacgaatttgatatagaatagcgtttacatattctccataatggtcaatcgccatttgttcgtatgtcataaattctttaattatatgacactgtgtattatttagttcatccttgttcattgttaggaatctatccaaaatggcaattatactagaactataggtgcgttgtatacacatattgatgtgtctgtttatacaatccatgatatttggatccatgctactaccttcgggtaaaattgtagcatcatataccatttctagtactttaggttcattattatccattgcagaggacgtcatgatcgaatcataaaaaaatatattatttttatgttattttgttaaaaataatcatcgaatacttcgtaagatactccttcatgaacataatcagttacaaaacgtttatatgaagtaaagtatctacgatttttacaaaagtccggatgcataagtacaaagtacgcgataaacggaataataatagatttatctagtctatctttttctatagctttcatagttagatacatggtctcagaagtaggattatgtaacatcagcttcgataaaatgactgggttatttagtcttacacattcgctcatacatgtatgaccgttaactacagagtctacactaaaatgattgaacaatagatagtctaccattgtttcgtattcagatagtacagcgtagtacatggcatcttcacaaattatatcattgtctaatagatatttgacgcatcttatggatcccacttcaacagccatcttaaaatcatattgctttcctttatcattaataatttctagaacatcatctctatcataaaagatacaaatattaactgtttgatccgtaataacattgctagtcaatagcaatttgttaataagatgcgctgggctcaatgtcttaataagaagtgtaagaggactatctccgaatttgttttgtttattaacatccgttgatggaagtaaaagatctataatgtctacattcttgactgttttagagcatacaatatggagaggtgtatttccatcatgatctggttttgagggactaattcctagtttcatcatccatgagattgtagaagcttttggattgtctgacataagatgtctatgaatatgatttttgccaaatttatccactatcctggcttcgaatccgatggacattatttttttaaacactctttctgaaggatctgtacacgccaacaacggaccacatccttcttcatcaaccgagttgttaatcttggctccatactgtaccaataaatttattctctctatgacttcatcatctgttcccgagagataatatagaggtgttttatgctgtttatcacacgcgtttggatctgcgccgtgcgtcagcagcatcgcgactattctattattattaattttagaagctatatgcaatggataatttccatcatcatccgtctcatttggagagtatcctctatgaagaagttcttcgacaaatcgttcatctagtcctttaattccacaatacgcatgtagaatgtgataattatttccagaaggttcgatagcttgtagcatattcctaaatacatctaaatttttactattatatttggcataaagagatagataatactcggccgacataatgttgtccattgtagtataaaaattaatatttctatttctatttctgtatatttgcaacaatttactctctataacaaatatcataacttagtttttttatgtcaagaaggcactggtttagttcatctataaatgtcacgccataactaccacgcatgccatactcagaattatgataaagatatttatccttggggtgtaggtaatggggattaatctttgttggatcagtctctaagttaacacatgtcacacatgatccatttatagttatatcacacgatgatgatttatgaattgattccggaagatcgctatcgtattttgtggttccacaattcatttccatacatgttattgtcacactaatattatgatgaactttatctagccgctgagtggtaaacaacagaacagatagtttattatctttaccaacaccctcagccgctgccacaaatctctgatccgtatccatgatggtcatgtttatttctagtccgtatccagtcaacactatgttagcatttctgtcgatatagctttcactcatatgacactcaccaataatagtagaattaatgtcgtaatttacaccaatagtgagttcggcggcaaagtaccaataccggtaatcttgtcgaggaggacatatagtattcttgtattctaccgaatacccgagagatgcgatacaaaagagcaagactaatttgtaaaccatcttactcaaaatatgtaacaatagtacgatgcaatgagtaagacaataggaaatctatcttatatacacataattattctatcaattttaccaattagttagtgtaatgttaacaaaaatgtgggagaatctaattagtttttctttacacaattgacgtacatgagtctgagttccttgtttttgctaattatttcatccaatttattattcttgacgatatcgagatcttttgtataggagtcaaacttgtattcaacatgcttttctataatcattttagctatttcggcatcatccaatagtacattttccagattagcagaatagatattaatgtcgtatttgaacagagcctgtaacatctcaatgtctttattatctatagccaatttaatgtccggaatgaagagaagggaattattggtgtttgtcgacgtcatatagtcgagcaagagaatcatcatatccacgtgtccattttttatagtgatgtgaatacaactaaggagaatagccagatcaaaagtagatggtatctctgaaagaaagtaggaaacaatacttacatcattaagcatgacggcatgataaaatgaagttttccatccagttttcccatagaacatcagtctccaatttttcttaacaaacagttttaccgtttgcatgttaccactatcaaccgcataatacaatgcggtgtttcccttgtcatcaaattgtgaatcatccagtccactgaatagcaaaatctttactattttggtatcttccaatgtggctgcctgatgtaatggaaattcattctctagaagatttttcaatgctccagcgttcaacaacgtacatactagacgcacgttattatcagctattgcataatacaaggcactatgtccatggacatccgccttaaatgtatctttactagagagaaagcttttcagctgcttagacttccaagtattaattcgtgacagatccatgtctgaaacgagacgctaattagtgtatattttttcattttttataattttgtcatattgcaccagaattaataatatctttaatagatctgattagtagatacatggctatcgcaaaacaacatatacacatttaataaaaataatatttattaagaaaattcagatttcacgtacccatcaatataaataaaataatgattccttacaccgtacccatattaaggagattccaccttacccataaacaatataaatccagtaatatcatgtctgatgatgaacacaaatggtgtattaaattccagtttttcaggagatgatctcgccgtagctaccataatagtagatgcctctgctacagttccttgttcgtcgacatctatctttgcattctgaaacattttataaatatataatgggtccctagtcatatgtttaaacgacgcattatctggattaaacatactaggagccatcatttcggctatcgacttaatatccctcttattttcgatagaaaatttagggagtttaagattgtacactttattccctaattgagacgaccaatagtctaattttgcagccgtgatagaatctgtgaaatgggtcatattatcacctattgccaggtacatactaatattagcatccttatacggaaggcgtaccatgtcatattctttgtcatcgattgtgattgtatttccttgcaatttagtaactacgttcatcatgggaaccgttttcgtaccgtacttattagtaaaactagcattgcgtgttttagtgatatcaaacggatattgccatatacctttaaaatatatagtattaatgattgcccatagagtattattgtcgagcatattagaatctactacattagacataccggatctacgttctactatagaattaattttattaaccgcatctcgtctaaagtttaatctatataggccgaatctatgatattgttgataatacgacggtttaatgcacacagtattatctacgaaactttgataagttagatcagtgtacgtatatttagatgttttcagcttagctaatcctgatattaattctgtaaatgctggacccagatctctttttctcaaatccatagtcttcaataattctattctagtattacctgatgcaggcaatagcgacataaacatagaaaacgaataaccaaacggtgagaagacaatattatcatcttgaatatttttatacgctactataccggcattggtaaatccttgtagacgataggcggacgctgaacacgctaacgatagtatcaataacgcaatcatgattttatggtattaataattaaccttatttttatgttcggtataaaaaaattattgatgtctacacatccttttgtaattgacatctatatatccttttgtataatcaactctaatcactttaacttttacagttttccctaccagtttatccctatattcaacatatctatccatatgcatcttaacactctctgccaagatagcttcagagtgaggatagtcaaaaagataaatatatagagcataatcattctcgtatactctgccctttattacatcacccgcattgggcaacgaataacaaaatgcaagcatcttgttaacgggctcgtaaattgggataaaaattatgtttttattgtcttatatctattttattcaagagaatattcaggaatttctttttccggttgtatctcgtcgcagtatatatcatttgtacattgtttcatattttttaatagtttacaccttttagtaggactagtatcgtacaattcatagctgtattttgaattccaatcacgcataaaaatatcttccaattgttgacgaagacctaatccatcatccggtgtaatattaatagatgctccacatgtatccgtaaagtaatttcctgtccaatttgaggtacctatataggccgttttatcggttaccatatatttggcatggtttaccctagaatacggaatgggaggatcagcatctggtacaataaatagctttacttctatatttatgtttttagattttagcatagcgatagatcttaaaaagtttctcatgataaacgaagatcgttgccagcaactaatcaatagcttaacggatacttgtctgtctatagcggatcttcttaattcatcttctatataaggccaaaacaaaattttacccgccttcgaataaataatagggataaagttcataacagatacataaacgaatttactcgcatttctaatacatgacaataaagcggttaaatcattggttctttccatagtacatagttgttgcggtgcagaagcaataaatacagagtgtggaacgccgcttacgttaatactaagaggatgatctgtattataatacgacggataaaagtttttccaattatatggtagattgttaactccaagataccagtatacctcaaaaatttgagtgagatccgctgccaagttcctattattgaagatcgcaatacccaattccttgacctgagttagtgatctccaatccatgttagcgcttcctaaataaatatgtgtattatcagatatccaaaattttgtatgaagaactcctcctaggatatttgtaatatctatgtatcgtacttcaactccggccatttgtagtctttcaacatcctttaatggtttgttagatttattaacggctactctaactcgtactcctcttttgggtaattgtacaatctcgtttaatattatcgtgccgaaattcgtacccacttcatccgataaactccaataaaaagatgatatatctagtgtttttgtggtattggatagaatttccctccacatgttaaatgtagacaaatatactttatcaaattgcatacctataggaatagtttctgtaatcactgcgattgtattatccggattcattttatttgttaaaagaataatcctatatcacttcactctattaaaaatccaagtttctatttctttcatgactgattttttaacttcatccgtttccttatgaagatgatgtttggcaccttcataaatttttatttctctattacaatttgcatgttgcatgaaataatatgcacctaaaacatcgctaatcttattgtttgttccctggagtatgagagtcggggggtgttaatcttggaaattatttttctaaccttgttggtagccttcaagacctgactagcaaatccagccttaattttttcatgattgactaatgggtcgtattggtatttataaactttatccatatctctagatactgattctggacatagctttccgactggcgcatttggtgtgatggttcccataagtttggcagctagcagattcagtcttgaaacagcatctgcattaactagaggagacattagaatcattgctgtaaacaagtttggattatcgtaagaggctagctcccatggaatgacccaataagtagatttaatagttaccacgtgctgtaccaaagtcatcaatcatcattttttcaccattacttcttccatgtccaatatgatcatgtgagaatactaaaattcctaacgatgatatgttttcagctagttcgtcataacgtccagaatgtttaccagctccatgacttatgaatactaatgccttaggatatgtaataggtttccaatatttacaatatatgtaatcattgtccagattgaacatacagtttgcactcatgattcacgttatataactatcaatattaacagttcgtttgatgatcatattatttttatgttttattgataattgtaaaaacatacaattaaatcaatatagaggaaggagacggctactgtcttttgtaagatagtcatggcgactaaattagattatgaggatgctgttttttactttgtggatgatgataaaatatgtagtcgcgactccatcatcgatctaatagatgaatatattacgtggagaaatcatgttatagtgtttaacaaagatattaccagttgtggaagactgtacaaggaattgatgaagttcgatgatgtcgctatacggtactatggtattgataaaattaatgagattgtcgaagctatgagcgaaggagaccactacatcaattttacaaaagtccatgatcaggaaagtttattcgctaccataggaatatgtgctaaaatcactgaacattggggatacaaaaagatttcagaatctagattccaatcattgggaaacattacagatttgatgaccgacgataatataaacatcttgatactttttctagaaaaaaaattgaattgatgatataggggtcttcataacgcataattattacgttagcattctatatccgtgttaaaaaaaattatcctatcatgtatttgagagttttatatgtagcaaacatgatagctgtgatgccaataagctttagatattcacgcgtgctagtgttagggatggtattatctggtggtgaaatgtccgttatataatctacaaaacaatcatcgcatatagtatgcgatagtagagtaaacatttttatagtttttactggattcatacatcgtctacccaattcggttataaatgaaattgtcgccaatcttacacccaaccccttgttatccattagcatagtattaacttcgttatttatgtcataaactgtaaatgattttgtagatgccatatcatacatgatattcatgtccctattataatcattactaactttatcacaatatatgttgataatatctatatatgatctagtctttgtgggcaactgtctatacaagtcgtctaaacgttgtttactcatatagtatcgaacagccatcattacatggtcccgttccgttgatagataatcgagtatgttagtggacttgtcaaatctatataccatattttctggaagtggatatacatagtcgtgatcaacattattgctagcctcatcttctatatcctgtactataccattatctatatcatctacataatctatgatattattacacataaacatcgacaacatactattgtttattatctaagtcctgttgatccaaacccttgatctcctctatttgtactatctagagattgtacttcttccagttctggataatatatacgttgatagattagctgagctattctatctccagtatttacattaaacgtacattttccattattaataagaatgactcctatgtttcccctataatcttcgtctattacaccacctcctatatcaatgccttttagtgacagaccagacctaggagctattctaccatagcagaacttaggcatggacatactaatatctgtcttaattaactgtctttctcctggagggatagtataatcgtaagcgctatacaaatcatatccggcagcacccggcgattgcctagtaggagatttagctctgttagtttccttaacaaatctaactggtgagttaatattcatgttgaacataaaactaatattttatttcaaaattatttaccatcccatatattccatgaataagtgtgatgattgtacacttctatagtatctatatacgatccacgataaaatcctcctatcaatagcagtttattatccactatgatcaattctggattatccctcggataaataggatcatctatcagagtccatgtattgctggattcacaataaaattccgcatttctaccaaccaagaataaccttctaccgaacactaacgcgcatgatttataatgaggataataagtggatggtccaaactgccactgatcatgattgggtagcaaatattctgtagttgtatcagtttcagaatgtcctcccattacgtatataacattgtttatggatgccactgctggattacatctaggtttcagaagactcggcatattaacccaagcagcatccccgtggaaccaacgctcaacagatgtgggatttggtagacctcctactacgtataatttattgttagcgggtatcccgctagcatacagtctggggctattcatcggaggaattggaatccaattgtttgatatataatttacagctatagcattgttatgtatttcattgttcatccatccaccgatgagatatactacttctccaacatgagtacttgtacacatatggaatatatctataatttgatccatgttcataggatactctatgaatggatacttgtatgatttgcgtggttgtttatcacaatgaaatattttggtacagtctagtatccattttacattatttatacctctgggagaaagataatttgacctgattacatttttgataaggagtagcagatttcctaatttatttcttcgcctcatataccacttaatgacaaaatcaactacataatcctcatctggaacatttagttcatcgctttctagaataagtttcatagatagataatcaaaattgtctatgatgtcatcttccagttccaaaaagtgtttggcaataaagtttttagtatgacataagagattggatagtccgtattctatacccatcatgtaacactcgacacaatattcctttctaaaatctcgtaagataaagtttatacaagtgtagatgataaattctacagaggttaatatagaagcacgtaataaattgacgacgttatgactatctatatatacctttccagtatatgagtaaataactatagaagttaaactgtgaatgtcaaggtctagacaaacccttgtaactggatctttatttttcgtgtatttttgacgtaaatgtgtgcgaaagtaaggagataactttttcaatatcgtagaattgactattatattgcctcctatggcatcaataattgttttgaatttcttagtcatagacaatgctaatatattcttacagtacacagtattgacaaatatcggcatttatgtttctttaaaagtcaacatctagagaaaaatgattatctttttgagacataactcccattttttggtattcacccacacgtttttcgaaaaaattagtttttccttccaatgatatattttccatgaaatcaaacggattggtaacattataaatttttttaaatcccaattcagaaatcaatctatccgcgacgaattctatatatgttttcatcatttcacaattcattcctataagtttaactggaagagccgcagtaagaaattcttgttcaatggatactgcatctgttataatagatctaacggtttcttcactcggtggatgcaataaatgtttaaacatcaaacatgcgaaatcgcagtgcagaccctcgtctctactaattagttcgttggaaaacgtgagtccgggcattaggccacgctttttaagccaaaatatggaagcgaatgatccagaaaagaaaattccttctactgcagcaaaggcaataagtctctctccataaccggcgctgtcatgtatccacttttgagcccaatcggccttcttttttacacaaggcatcgtttctatggcattaaagagatagtttttttcattactatctttaacataagtatcgatcaaaagactatacatttccgaatgaatgttttcaatggccatctgaaatccgtagaaacatctagcctcggtaatctgtacttctgtacaaaatcgttccgccaaattttcattcactattccgtcactggctgcaaaaaacgccaatacatgttttataaaatatttttcgtctggtgttagtttattccaatcattgatatctttagatatatctacttcttccactgtccaaaatgatgcctctgcctttttatacatgttccagatgtcatgatattggattgggaaaataacaaatctatttggatttggtgcaaggatgggttccataactaaattaacaataacaataaattttttttcagttatctatatgcctgtacttggattttttgtacatcgatatcgccgcaatcactacaataattacaagtattattgatagcattgttattagtactatcataattaaattatctacattcatgggtgctgaataatcgttattatcatcattatcattttgtaattgtgacatcatactagataaatcgtttgcgagattgttgtgggaagcgggcatggaggatgcattatcattattatttaacgccttccatttggattcacaaatgttacgcacattcaacattttatggaaactataattttgtgaaaacaaataacaagaaaactcgtcatcgttcaaatttttaacgatagtaaaccgattaaacgtcgagctaatttctaacgctagcgactctgttggatatgggtttccagatatatatcttttcagttcccctacgtatctataatcatctgtaggaaatggaagatatttccatttatctactgttcctaatatcatatgtggtggtgtagtagaaccattaagcgcgaaagatgttatttcgcatcgtattttaacttcgcaataatttctggttagataacgcactctaccagtcaagtcaatgatattagcctttacagatatattcatagtagtcgtaacgatgactccatcttttagatgcgatactcctttgtatgtaccagaatcttcgtacctcaaactcgatatatttaaacaagttaatgagatattaacgcgttttatgaatgatgatatataaccagaagttttatcctcggtggctagcgctataaccttatcattataataccaactagtgtgattaatatgtgacacgtcagtgtgggtacaaatatgtacattatcgtctacgtcgtattcgatacatccgcatacagccaacaaatataaaatgacaaatactctaacgccgttcgtacccatcttgatgcggtttaataaatgttttgatttcaatttattgtaaaaaaagattcggttttatactgttcgatattctcattgcttatattttcatctatcatctccacacagtcaaatccgtggttagcatgcacctcatcaaccggtaaaagactatcggactcttctatcattataactctagaatatttaatttggtcattattaatcaagtcaattatcttatttttaacaaacgtgagtattttactcattttttataaaaacttttagaaatatacagactctatcgtgtgtctatatcttctttttatatccaatgtatttatgtctgatttttcttcatttatcatatataatggtccaaattctacacgtgcttcggattcatccagatcattaaggttcttataattgtaacatccttctcttccctcttctacatcttccttcttattcttattcttagcgtcacagaatctaccacagcaggatcccatgacgagcgtcatattaaactaatccattttcaattataatatatgattagtaatgaccattaaaataaaaaatattcttcataaccggcaagaaagtgaaaagttcacattgaaactatgtcagtagtatacatcatgaaatgatgatatatatatactctattttggtggaggattatatgatataattcgtggataatcatttttaagacacatttctttattcgtaaatcttttcacgttaaatgagtgtccatattttgcaatttcttcatatgatggcggtgtacgtggacgaggctgctcctgttcttgttgtggtcgccgactgtcgtgtctgcgtttagatccctccattatcgcgattgcgtagatggagtactattttataccttgtaattaaatttttttattaattaaacgtataaaaacgttccgtatctgtatttaagagccagatttcgtctaatagaacaaatagctacagtaaaaataactagaataattgctacacccactagaaaccacggatcgtaatacggcaatcggttttcgataataggtggaacgtatattttatttaaggacttaacaattgtctgtaaaccacaatttgcttccgcggatcctgtattaactatctgtaaaagcatatgttgaccgggcggagccgaacattctccgatatctaatttctgtatatctataatattattaacctccgcatacgcattacagttcttttctagcttggataccgcactaggtacatcgtctagatctattcctatttcctcagcgatagctcttctatccttttccggaagcaatgaaatcacttcaataaatgattcaaccatgagtgtgaaactaagtcgagaattactcatgcatttgttagttattcggagcgcgcaatttttaaactgtcctataacctctcctatatgaatagcacaagtgacattagtagggatagaatgttgagctaatttttgtaaataactatctataaaaagattatacaaagttttaaactctttagtttccgccatttatccagtctgagaaaatgtctctcataataaatttttccaagaaactaattgggtgaagaatggaaacctttaatctatatttatcacagtctgttttggtacacatgatgaattcttccaatgccgtactaaattcgatatctttttcgatttctggatatgtttttaataaagtatgaacaaagaaatggaaatcgtaataccagttatgtttaactttgaaattgttttttattttcttgttaatgattccagccacttgggaaaagtcaaagtcgtttaatgccgatttaatacgttcattaaaaacaaactttttatcctttagatgaattattattggttcattggaatcaaaaagtaagatattatcgggtttaagatctgcgtgtaaaaagttgtcgcaacagggtagttcgtagattttaatgtataacagagccatctgtaaaaagataaactttatgtattgtaccaaagatttaaatcctaatttgatagctaactcggtatctactttatctgccgaatacagtgctaggggaaaaattataatgtttcctctttcatattcgtagttagttctcttttcatgttcgaaaaagtgaaacatgcggttaaaatagtttataacattaatattactgttaataactgccggataaaagtgggatagtaatttcacgaatttgatactgtcctttctctcgttaaacgcctttaaaaaaactttagaagaatatctcaatgagagttcctgaccatccatagtttgtatcaataatagcaacatatgaagaacacgtttatacagagtatgtaaaaatgttaatttatagtttaatcccatggcccacgcacacacgattaattttttttcatctccctttagattgttgtatagaaatttgggtactgtgaactccgccgtagtttccatgggactatataattttgtggcctcgaatacaaattttactacatagttatctatcttaaagactataccatatcctcctgtagatatgtgataaaaatcgtcgtttataggataaaatcgtttatccttttgttggaaaaaggatgaattaatgtaatcattctcttctatctttagtagtgtttccttattaaaattcttaaaataatttaacaatctaactgacggagcccaattttggtgtaaatctaattgggacattatattgttaaaatacaaacagtctcctaatataacagtatctgataatctatggggagacatccattgatattcaggggatgaatcattggcaacacccatttattgtacaaaaagccccaatttacaaacgaaagtccaggtttgatagagacaaacaattaactattttgtctctgtttttaacacctccacagtttttaatttctttagtaatgaaattattcacaatatcagtatcttctttatctaccagagattttactaacttgataaccttggctgtctcattcaatagggtagtaatatttgtatgtgtgatattgatatctttttgaattgtttcttttagaagtgattctttgatggtgccagcatacgaattacaataatgcagaaactcggttaacatgcaggaattatagtaagccaattccaattgttgcctgtgttgtattagagtgtcaatatgagcaatggtgtccttgcgtttctctgatagaatgcgagcagcgattttggcgttatcatttgacgatatttctggaatgacgaatcctgtttctactaactttttggtaggacaaagtgaaacaatcaagaagatagcttctcctcctatttgtggaagaaattgaactcctctagatgatctactgacgatagtatctccttgacagatattggaccgaattacagaagtacctggaatgtaaagccctgaaaccccctcattttttaagcagattgttgccgtaaatcctgcactatgcccaagatagagagctcctttggtgaatccatctctatgtttcagtttaaccaagaaacagtcagctggtctaaaatttccatctctatctaatacagcatctaacttgatgtcaggaactatgaccggtttaatgttatatgtaacattgagtaaatccttaagttcataatcatcactgtcatcagttatgtacgatccaaacaatgtttctaccggcatagtggatacgaagatgctatccatcagaatgtttccctgattagtattttctatatagctattcttctttaaacgattttccaaatcagtaactatgttcatttttttaggagtaggacgcctagccagtatggaagaggattttctagatcctctcttcaacatctttgatctcgatggaatgcaaaaccccatagtgaaacaaccaacgataaaaataatattgtttttcactttttataattttaccatctgactcatggattcattaatatctttataagagctactaacgtataattctttataactgaactgagatatatacaccggatctatggtttccataattgagtaaatgaatgctcggcaataactaatggcaaatgtatagaacaacgaaattatactagagttgttaaagttaatattttctatgagctgttccaataaattatttgttgtgactgcgttcaagtcataaatcatcttgatactatccagtaaaccgtttttaagttctggaatattatcatcccattgtaaagcccctaattcgactatcgaatatcctgctctgatagcagtttcaatatcgacggacgtcaatactgtaataaaggtggtagtattgtcatcatcgtgataaactacgggaatatggtcgttagtaggtacggtaactttacacaacgcgatatataactttccttttgtaccatttttaacgtagttgggacgtcctgcagggtattgttttgaagaaatgatatcgagaacagatttgatacgatatttgttggattcctgattattcactataatataatctagacagatagatgattcgataaatagagaaggtatatcgttggtaggataatacatccccattccagtattctcggatactctattgatgacactagttaagaacatgtcttctattctagaaaacgaaaacatcctacatggactcattaaaacttctaacgctcctgattgtgtctcgaatgcctcgtacaaggatttcaaggatgccatagattctttgaccaacgatttagaattgcgtttagcatctgatttttttattaaatcgaatggtcggctctctggtttgctaccccaatgataacaatagtcttgtaaagataaaccgcaagaaaatttatacgcatccatccaaataaccctagcaccatcggatgatattaatgtattattatagattttccatccacaattattgggccagtatactgttagcaacggtatatcgaatagattactcatgtaacctactagaatgatagttcgtgtactagtcataatatctttaatccaatctaaaaaatttaaaattagattttttacactgttaaagttaacaaaagtattacccgggtacgtggatatcatatatggcattggtccattatcagtaatagctccataaactgatacggcgatggtttttatatgtgtttgatctaacgaggaagaaattcgcgcccacaattcatctctagatatgtatttaatatcaaacggtaacacatcaatttcgggacgcgtatatgtttctaaatttttaatccaaatataatgatgacctatatgccctattatcatactgtcaactatagtacacctagggaacttacgatacatctgtttcctataatcgttaaattttacaaatctataacatgctaaaccttttgacgacagccattcattaatttctgatatggaatctgtattctcgataccgtatcgttctaaagccagtgctatatctccctgttcgtgggaacgctttcgtataatatcgatcaacggataatctgaagtttttggagaataatatgactcatgatctatttcgtccataaacaatctagacataggaattggaggcgatgatcttaattttgtgcaatgagtcgtcaatcctataacttctaatcttgtaatattcatcatcgacataatactatctatgttatcatcgtatattagtataccatgaccttcttcatttcgtgccaaaatgatatacagtcttaaatagttacgcaatatctcaatagtttcataattgttagctgttttcatcaaggtttgtatcctgtttaacatgatggcgttctataacgtctctattttctatttttaattttttaaatttttaacgatttactgtggctagatacccaatctctctcaaatatttttttagcctcgcttacaagctgtttatctatactattaaaactgacgaatccgtgattttggtaatgggttccgtcgaaatttgccgaagtgatatgaacatattcgtcgtcgactatcaacaattttgtattattctgaatagtgaaaaccttcacagatagatcattttgaacacacaacgcatctagacttttggcggttgccatagaatatacgtcgttcttatcccaattaccaactagaagtctgatcttaactcctctattaatggctgcttctataatggagttgtaaatgtcgggccaatagtagctattaccgtcgacacgtgtagtgggaactatggccaaatgttcaatatctatactagtcttagctgacctgagtttatcaataactacatcggtatctagatctctagaatatcccaataggtgttccggagaatcagtaaagaacactccacctataggattcttaatatgatacgcagtgctaactggcaaacaacaagccgcagagcataaattcaaccatgaattttttgcgctattaaaggctttaaaagtatcaaatcttctacgaagatctgtggccagcgggggataatcagaatatacacctaacgttttaatcgtatgtatagatcctccagtaaatgacgcgtttcctacataacatctttcatcatctgacacccaaaaacaaccgagtagtagtcccacattattttttttatctatattaacggttataaaatttatatccgggcagtgactttgtagctctcccagatttcttttccctcgttcatctagcaaaactattattttaatccctttttcagatgcctcttttagtttatcaaaaataagcgctcccctagtcgtactcagaggattacaacaaaaagatgctatgtatatatatttcttagctagagtgataatttcgttaaaacattcaaatgttgttaaatgatcggatctaaaatccatattttctggtagtgtttctaccagcctacattttgctcccgcaggtaccgatgcaaatggccacatttagttaacataaaaacttatacatcctgttctatcaacgattctagaatatcatcggctatatcgctaaaattttcatcaaagtcgacatcacaacctaactcagtcaatatattaagaagttccatgatgtcatcttcgtctatttctatatccgtatccattgtagattgttgaccgattatcgagtttaaatcattactaatactcaatccttcagaatacaatctgtgtttcattgtaaatttataggcggtgtatttaagttggtagattttcaattatgtattaatatagcaacagtagttcttgctcctccttgattctagcatcctcttcattattttcttctacgtacataaacatgtccaatacgttagacaacacaccgacgatggcggccgcagatctcgagttatgatctacttccttaccgtgcaataaattagaatatattttctacttttacgagaaattaattattgtatttattatttatgggtgaaaaacttactataaaaagcgggtgggtttggaattagtgaaagcttaaaaattgaaattttattttttttttttggaatataaataagctcgaagtcgacagatctaggcctggtaccaggaggaggaattcagcttaaagatgacttcgaaagtttatgatccagaacaaaggaaacggatgataactggtccgcagtggtgggccagatgtaaacaaatgaatgttcttgattcatttattaattattatgattcagaaaaacatgcagaaaatgctgttatttttttacatggtaacgcggcctcttcttatttatggcgacatgttgtgccacatattgagccagtagcgcggtgtattataccagatcttattggtatgggcaaatcaggcaaatctggtaatggttcttataggttacttgatcattacaaatatcttactgcatggtttgaacttcttaatttaccaaagaagatcatttttgtcggccatgattggggtgcttgtttggcatttcattatagctatgagcatcaagataagatcaaagcaatagttcacgctgaaagtgtagtagatgtgattgaatcatgggatgaatggcctgatattgaagaagatattgcgttgatcaaatctgaagaaggagaaaaaatggttttggagaataacttcttcgtggaaaccatgttgccatcaaaaatcatgagaaagttagaaccagaagaatttgcagcatatcttgaaccattcaaagagaaaggtgaagttcgtcgtccaacattatcatggcctcgtgaaatcccgttagtaaaaggtggtaaacctgacgttgtacaaattgttaggaattataatgcttatctacgtgcaagtgatgatttaccaaaaatgtttattgaatcggatccaggattcttttccaatgctattgttgaaggcgccaagaagtttcctaatactgaatttgtcaaagtaaaaggtcttcatttttcgcaagaagatgcacctgatgaaatgggaaaatatatcaaatcgttcgttgagcgagttctcaaaaatgaacaagcggccgccgccaccatgagcaagggcgaggaactgttcactggcgtggtcccaattctcgtggaactggatggcgatgtgaatgggcacaaattttctgtcagcggagagggtgaaggtgatgccacatacggaaagctcaccctgaaattcatctgcaccactggaaagctccctgtgccatggccaacactggtcactaccttcacctatggcgtgcagtgcttttccagatacccagaccatatgaagcagcatgactttttcaagagcgccatgcccgagggctatgtgcaggagagaaccatctttttcaaagatgacgggaactacaagacccgcgctgaagtcaagttcgaaggtgacaccctggtgaatagaatcgagctgaagggcattgactttaaggaggatggaaacattctcggccacaagctggaatacaactataactcccacaatgtgtacatcatggccgacaagcaaaagaatggcatcaaggtcaacttcaagatcagacacaacattgaggatggatccgtgcagctggccgaccattatcaacagaacactccaatcggcgacggccctgtgctcctcccagacaaccattacctgtccacccagtctgccctgtctaaagatcccaacgaaaagagagaccacatggtcctgctggagtttgtgaccgctgctgggatcacacatggcatggacgagctgtacaagtgagcggccgccctgctagcaagcttgctagcggccgctcgagatctgcggccgctacagacacgaatatgactaaaccgatgaccatttaaaaacccctctctagctttcacttaaactgtatcgatcattcttttagcacatgtataatataaaaacattattctatttcgaatttaggcttccaaaaatttttcatccgtaaaccgataataatatatatagacttgttaatagtcggaataaatagattaatgcttaaactatcatcatctccacgattagagatacaatatttacattctttttgctgtttcgaaactttatcaatacacgttaatacaaacccaggaaggagatattgaaactgaggctgttgaaaatgaaacggtgaatacaataattcagataatgtaaaatcatgattccgtattctgatgatattagaactgctaatggatgtcgatggtatgtatctaggagtatctattttaacaaagcatcgatttgctaatatacaattatccttttgattaattgttattttattcatattcttaaaaggtttcatatttatcaattcttctacattaaaaatttccatttttaatttatgtagccccgcaatactcctcattacgtttcattttttgtctataatatccattttgttcatctcggtacatagattatccaattgagaagcgcatttagtagttttgtacattttaagtttattgacgaatcgtcgaaaactagttatagttaacattttattatttgataccctgatattaatacccctgccgttactattatttataactgatgtaatccacgtaacattggaattaactatcgatagtaatgcatcgacgcttccaaaattgtctattataaactcaccgataatttttttattgcatgttttcatattcattaggattatcaaatctttaatcttattacgattgtatgcgttgatattacaagacgtcattctaaaagacggaggatctccatcaaatgccagacaatcacgtacaaagtacatggaaataggttttgttctattgcgcatcatagatttatatagaacacccgtagaaatactaatttgttttactctataaaatactaatgcatctatttcatcgttttgtataacgtctttccaagtgtcaaattccaaatttttttcattgatagtaccaaattcttctatctctttaactacttgcatagataggtaattacagtgatgcctacatgccgttttttgaaactgaatagatgcgtctagaagcgatgctacgctagtcacaatcaccactttcatatttagaatatatatatgtaaaaatatagtagaatttcattttgtttttttctatgctataaatgaattctcattttgcatctgctcatactccgttttatattaataccaaagaaggaagatatctggttctaaaagccgttaaagtatgcgatgttagaactgtagaatgcgaaggaagtaaagcttcctgcgtactcaaagtagataaaccctcatcgcccgcgtgtgagagaagaccttcgtccccgtccagatgcgagagaatgaataaccctggaaaacaagttccgtttatgaggacggacatgctacaaaatatgttcgcggctaatcgcgataatgtagcttctagacttttgtcctaaaatactattatatccttttcgatattaataaatccgtgtcgtccaggttttttatctctttcagtatgtgaatagataggtattttatctctattcatcatcgaatttaagagatccgataaacattgtttgtattctccagatgtcagcatctgatacaacaatatatgtgcacataaacctctggcacttatttcatgtaccttccccttatcactaaggagaatagtatttgagaaatatgtatacatgatattatcatgaattagatatacagaatttgtaacactctcgaaatcacacgatgtgtcggcgttaagatctaatatatcactcgataacacattttcatctagatacactagacattttttaaagctaaaatagtctttagtagtaacagtaactatgcgattattttcatcgatgatacatttcatcggcatattattacgcttaccatcaaagactataccatgtgtatatctaacgtattctagcatggttgccatacgcgcattaaacttttcaggatctttggatagatcttccaatctatctatttgagaaaacatttttatcatgttcaatagttgaaacgtcggatccactatatagatattatctataaagattttaggaactacgttcatggtatcctggcgaatattaaaactatcaatgatatgattatcgttttcatcttttatcaccatatagtttctaagatatgggattttacttaatataatattatttcccgtgataaattttattagaaaggccaaatctataagaaaagtcctagaattagtctgaagaatatctatatcgccgtatagtatatttggattaattagatatagagaatatgatccgtaacatatacaacttttattatggcgtctaagatattcttccatcaacttattaacatttttgactagggaagatacattatgacgtcccattacttttgccttgtctattactgcgacgttcatagaatttagcatatctcttgccaattcttccattgatgttacattataagaaattttagatgaaattacatttggagctttaatagtaagaactcctaatatgtccgtgtatgtggtcactaatacagattgtagttctataatcgtaaataatttacctatattatatgtttgagtctgtttagaaaagtagctaagtatacgatcttttatttctgatgcagatgtattaacatcggaaaaaaatctttttttattcttttttactaaagatacaaatatgtctttgttaaaaacagttattttctgaatatttctagcttgtaattttaacatatgatattcgttcacactaggtactctgcctaaataggtttctataatctttaatgtaatattaggaaaagtattctgatcaggattcctattcattttgaggatttaaaactctgattattgtctaatatggtctctacgcaaactttttcacagagcgatagagtttttgataactcgtttttcttaagaaatataaaactactgtctccagagctcgctctatcttttattttatctaattcgatacaaactcctgatactggttcagaaagtaattcattaattttcagtcctttatagaagatatttaatatagataatacaaaatcttcagtttttgatatcgatctgattgatcctagaactagatatattaataacgtgctcattaggcagtttatggcagcttgataattagatatagtatattccagttcatatttattagataccgcattgcccagattttgatattctatgaattcctctgaaaataaatccaaaataactagacattctattttttgtggattagtgtactctcttccctctatcatgttcactactggtgtccacgatgataaatatctagagggaatataatatagtccataggatgccaatctagcaatgtcgaataactgtaattttattcttcgctcttcattatgaattgattcttgaggtataaacctaacacaaattatattattagacttttcgtatgtaatgtctttcatgttataagtttttaatcctggaatagaatctattttaatgaggcttttaaacgcagagttctccaacgagtcaaagcataatactctgttgtttttcttatatacgatgttacgattttcttctttgaatggaataggtttttgaattagtttataattacaacataatagataaggaagtgtgcaaatagtacgcggaaaaaacataatagctcccctgttttcatccatggttttaagtaaatgatcactggcttctttagtcaatggatattcgaacattaaccgtttcatcatcattggacagaatccatatttcttaatgtaaagagtgatcaaatcattgtgtttattgtaccatcttgttgtaaatgtgtattcggttatcggatctgctcctttttctattaaagtatcgatgtcaatctcgtctaagaattcaactatatcgacatatttcatttgtatacacataaccattactaacgtagaatgtataggaagagatgtaacgggaacagggtttgttgattcgcaaactattctaatacataattcttctgttaatacgtcttgcacgtaatctattatagatgccaagatatctatataattattttgtaagatgatgttaactatgtgatctatataagtagtgtaataattcatgtattttgatatatgttccaactctgtctttgtgatgtctagtttcgtaatatctatagcatcctcaaaaaatatattcgcatatattcccaagtcttcagttctatcttctaaaaaatcttcaacgtatggaatataataatctattttacctcttctgatatcattaatgatatagtttttgacactatcttctgtcaattgattcttattcactatatctaagaaacggatagcgtccctaggacgaactactgccattaatatctctattatagcttctggacataattcatctattataccagaattaatgggaactattccgtatctatctaacatagttttaagaaagtcagaatctaagacttgatgttcatatattggttcatacatgaaatgatctctattgatgatagtgactatttcattctctgaaaattggtaactcattctatatatgctttccttgttgatgaaggatagaatatactcaatagaatttgtaccaacaaactgttctcttatgaatcgtatatcatcatctgaaataatcatgtaaggcatacatttaacaattagagacttgtctcctgttatcaatatactattcttgtgataatttatgtgtgaggcaaatttgtccacgttctttaattttgttatagtagatatcaaatccaatggagctacagttcttggcttaaacagatatagtttttctggaacaaattctacaacattattataaaggactttgggtagataagtgggatgaaatcctattttaattaatgcgatagccttgtcctcgtgcagatatccaaacgcttttgtgatagtatggcattcattgtctagaaacgctctacgaatatctgtgacagatatcatctttagagaatatactagtcgcgttaatagtactacaatttgtattttttaatctatctcaataaaaaaattaatatgtatgattcaatgtataactaaactactaactgttattgataactagaatcagaatctaatgatgacgtaaccaagaagtttatctactgccaatttagctgcattatttttagcatctcgtttagattttccatcggccttatcgaatactcttccgtcgatgtctacacaggcataaaatgtaggagagttactaggcccaactgattcaatacgaaaagaccaatctctcctagtaatttggcagtactcattaataacggtgacagggttagcatctttccaatcaataatttttttagccggaataacatcatcaaaagacttatgatcctctctcattgatttttcgcgggatacatcatctattatgacgtcagccatagcatcagcatccggcttatccgcctccgttgtcataaaccaacgaggaggaatatcgtcggagctgtacaccatagcactacgttgaagatcgtacagagctttattaacttctcgcttctccatattaagttgtctagttagttgtgcagcagtagctccttcgattccaatgtttttaatagccgcacacacaatctctgcgtcagaacgctcgtcaatatagatcttagacatttttagagagaactaacgcaaccagcaataaaactgaacctactttatcatttttttattcatcatcctctggtggttcgtcgttcctatcaaatgtagctctgattaacccgtcatctataggtgatgctggttctggagattctggaggagatggattattatctggaagaatctctgttatttccttgttttcatgtatcgattgcgttgtaacattaagattgcgaaatgctctaaatttgggaggcttaaagtgttgtttgcaatctctacacgcgtgtctaactagtggaggttcgtcagctgctctagtttgaatcatcatcggcgtagtattcctacttttacagttaggacacggtgtattgtatttctcgtcgagaacgttaaaataatcgttgtaactcacatcctttattttatctatattgtattctactcctttcttaatgcattttataccgaataagagatagcgaaggaattctttttcggtgccgctagtacccttaatcatatcacatagtgttttatattccaaatttgtggcaatagacggtttatttctatacgatagtttgtttctggaatcctttgagtattctataccaatattattctttgattcgaatttagtttcttcgatattagattttgtattacctatattcttgatgtagtactttgatgatttttccatggcccattctattaagtcttccaagttggcatcatccacatattgtgatagtaattctcggatatcagtagcggctaccgccattgatgtttgttcattggatgagtaactactaatgtatacattttccatttataacacttatgtattaactttgttcatttatattttttcattattatgttgatattaacaaaagtgaatatatatatgttaataattgtattgtggttatacggctacaattttataatgagtgaaagtcagtgtccgatgatcaatgacgatagctttactctgaaaagaaagtatcaaatcgatagtgcggagtcaacaataaaaatggataagaagaggataaagtttcagaatagagccaaaatggtaaaagaaataaatcagacaataagagcagcacaaactcattacgagacattgaaactaggatacataaaatttaagagaatgattatgactactactctagaagatatagcaccatctattccaaataatcagaaaacttataaactattctcggacatttcagccatcggcaaagcatcacagaatccgagtaagatggtatatgctctgctgctttacatgtttcccaatttgtttggagatgatcatagattcattcgttatagaatgcatccaatgagtaaaatcaaacacaagatcttctctcctttcaaacttaatcttattagaatattagtggaagaaagattctataataatgaatgcagatctaataaatggagaataattggaacacaagttgataaaatgttgatagctgaatctgataaatatacaatagatgcaaggtataacctaaaacccatgtatagaatcaagggagaatctgaagaagataccctctttatcaaacagatggtagaacaatgtgtgacatcccaggaattggtggaaaaagtgttgaagatactgtttagagatttgttcaagagtggagaatacaaagcgtacagatacgatgatgatgtagaaaatggatttattggattggatacactaaaattaaacattgttcatgatatagttgaaccatgtatgcctgttcgtaggccagtggctaagatactgtgtaaagaaatggtaaataaatactttgagaatccgctacatattattggtaaaaatcttcaagagtgcattgactttgttagtgaataggcatttcatctttctccaatactaattcaaattgttaaattaataatggatagtataaatagttattagttataagatagtaaaaataattattagaataagagtgtagtatcatagataactctcttctataaaaatggattttattcgtagaaagtatcttatatacacagtagaaaataatatagattttttaaaggatgatacattaagtaaagtaaacaattttaccctcaatcatgtactagctctcaagtatctagttagcaattttcctcaacacgttattactaaggatgtattagctaataccaatttttttgttttcatacatatggtacgatgttgtaaagtgtacgaagcggttttacgacacgcatttgatgcacccacgttgtacgttaaagcattgactaagaattatttatcgtttagtaacgcaatacaatcgtacaaggaaaccgtgcataaactaacacaagatgaaaaatttttagaggttgccgaatacatggacgaattaggagaacttataggcgtaaattatgacttagttcttaatccattatttcacggaggggaacccatcaaagatatggaaatcatttttttaaaactgtttaagaaaacagacttcaaagttgttaaaaaattaagtgttataagattacttatttgggcatacctaagcaagaaagatacaggcatagagtttgcggataatgatagacaaaatatatacactctatttcaacaaactggtagaatcgtccatagcaatctaacagaaacgtttagagattatatctttcccggagataagactagctattgggtgtggttaaacgaaagtatagctaatgatgcggatatcgttcttaatagacacgccattaccatgtatgataaaattcttagttatatatactctgagataaaacaaggacgcgttaataaaaacatgcttaagttagtttatatctttgagcctgaaaaagatatcagagaacttctgctagaaatcatatatgatattcctggagatatcctatctattattgatgcaaaaaacgacgattggaaaaaatattttattagtttttataaagctaattttattaacggtaatacatttattagtgatagaacgtttaacgaggacttattcagagttgttgttcaaatagatcccgaatatttcgataatgaacgaattatgtctttattctctacgagtgctgcggacattaaacgatttgatgagttagatattaataacagttatatatctaatataatttatgaggtgaacgatatcacattagatacaatggatgatatgaagaagtgtcaaatctttaacgaggatacgtcgtattatgttaaggaatacaatacatacctgtttttgcacgagtcggatcccatggtcatagagaacggaatactaaagaaactgtcatctataaaatccaagagtagacggctgaacttgtttagcaaaaacattttaaaatattatttagacggacaattggctcgtctaggtcttgtgttagatgattataaaggagacttgttagttaaaatgataaaccatcttaagtctgtggaggatgtatccgcattcgttcgattttctacagataaaaaccctagtattcttccatcgctaatcaaaactattttagctagttataatatttccatcatcgtcttatttcaaaggtttttgagagataatctatatcatgtagaagaattcttggataaaagcatccatctaaccaagacggataagaaatatatacttcaattgataagacacggtagatcatagaacagaccaaatatattattaataatttgtatatacatagatataattatcacacatttttgataaatgggaactgctgcaacaattcagactcccaccaaattaatgaataaagaaaatgcagaaatgattttggaaaaaattgttgatcatatagttatgtatattagtgacgaatcaagtgattcagaaaataatcctgaatatattgattttcgtaacagatacgaagactatagatctctcattataaaaagtgatcacgagtttgtaaagctatgtaaaaatcatgcggagaaaagttctccagaaacgcaacaaatgattatcaaacacatatacgaacaatatcttattccagtatctgaagtactattaaaacctataatgtccatgggtgacataattacatataacggatgtaaagacaatgaatggatgctagaacaactctctaccctaaactttaacaatctccgcacatggaactcatgtagcataggcaatgtaacgcgtctgttttatacattttttagttatctgatgaaagataaactaaatatataagtataatcccattctaatactttaacctgatgtattagcatcttattagaatattaacctaactaaaagacataacataaaaactcattacatagttgataaaaagcggtaggatataaatattatggctgccaccgttccgcgttttgacgacgtgtacaaaaatgcacaaagaagaattctagatcaagaaacattttttagtagaggtctaagtagaccgttaatgaaaaacacatatctatttgataattacgcgtatggatggataccagaaactgcaatttggagtagtagatacgcaaacctagatgctagtgactattatcccatttcgttgggattacttaaaaagttcgagtttctcatgtctctatataaaggtcctattcccgtatatgaagaaaaagtaaatactgaattcatagccaatggatcgttctctggtagatacgtatcatatcttcgaaagttttctgcccttccaacaaacgagtttattagttttttgttactgacttccattccaatctataatatcttgttctggtttaaaaacacacagtttgatattactaaacacacattattcagatacgtctatacagataatgccaaacacctggcgttggctaggtatatgcatcaaacaggagactataagcctttgtttagtcgtctcaaagagaattatatatttaccggtcccgttccaataagtatcaaagatatagatcaccctaatcttagtagagcaagaagtccatccgattatgagacattagctaatattagtactatattgtactttaccaagtatgatccggtattaatgtttttattgttttacgtacctgggtattcaattactacaaaaattactccagccgtagaatatctaatggataaactgaatctaacaaagagcgacgtacaactgttgtaaattattttatgcttcgtaaaatgtaggttttgaaccaaacattctttcaaagaatgagatgcataaaactttattatccaatagattgactatttcggacgtcaatcgtttaaagtaaacttcgtaaaatattctttgatcactgccgagtttaaaacttctatcgataattgtctcatatgttttaatatttacaagttttttggtccatggtacattagccggacaaatatatgcaaaataatatcgttctccaagttctatagtttctggattatttttattatattcagtaactaaatacatattagggttatctgcggatttataatttgagtgatgcattctactcaacataaataattctagaggagacgatctactatcaaattcggatcgtaaatctgtttctaaagaacggagaatatctatacatacctgattagaattcatccgtccttcagacaacatctcagacagtctggttttgtacatcttaatcatattcttatgaaacttggaaacatctcttctagtttcactagtacctttattaattctctcaggtacagattttgaattcgacgatgctgagtatttcatcgttgtatatttcttcttcgattgcataatcagattcttatataccgcctcaaactctattttaaaattattaaacaatactctattattaatcagtcgttctaactctttcgctatttctatagacttatctacatcttgactgtctatctctgtaaacacggagtcggtatctccatacacgctacgaaaacgaaatctgtaatctataggcaacgatgttttcacaatcggattaatatctctatcgtccatataaaatggattacttaatggattggcaaaccgtaacataccgttagataactctgctccatttagtaccgattctagatacaagatcattctacgtcctatggatgtgcaactcttagccgaagcgtatgagtatagagcactatttctaaatcccatcagaccatatactgagttggctactatcttgtacgtatattgcatggaatcatagatggccttttcagttgaactggtagcctgttttagcatctttttatatctggctctctctgccaaaaatgttcttaatagtctaggaatggttccttctatcgatctatcgaaaattgctatttcagagatgaggttcggtagtctaggttcacaatgaaccgtaatatatctaggaggtggatatttctgaagcaatagctgattatttatttcttcttccaatctattggtactaacaacgacaccgactaatgtttccggagatagatttccaaagatacacacattaggatacagactgttataatcaaagattaatacattattactaaacattttttgttttggagcaaataccttaccgccttcataaggaaacttttgttttgtttctgatctaactaagatagttttagtttccaacaatagctttaacagtggacccttgatgactgtactcgctctatattcgaataccatggattgaggaagcacatatgttgacgcacccgcgtctgtttttgtttctactccataatactcccacaaatactgacacaaacaagcatcatgaatacagtatctagccatatctaaagctatgtttagattataatccttatacatctgagctaaatcaacgtcatcctttccgaaagataatttatatgtatcattaggtaaagtaggacataatagtacgactttaaatccattttcccaaatatctttacgaattactttacatataatatcctcatcaacagtcacataattacctgtggttaaaacctttgcaaatgcagcggctttgcctttcgcgtctgtagtatcgtcaccgatgaacgtcatttctctaactcctctatttaatactttacccatgcaactgaacgcgttcttggatatagaatccaatttgtacgaatccaatttttcaaatttttgaatgaatgaatatagatcgaaaaatatagttccattattgttattaacgtgaaacgtagtattggccatgccgcctactcccttatgactagactgatttctctcataaatacagagatgtacagcttcctttttgtccggagatctaaagataattttctctcctgttaataactctagacgattagtaatatatctcagatcaaagttatgtccgttaaaggtaacgacgtagtcgaacgttagttccaacaattgtttagctattcgtaacaaaactatttcagaacatagaactagttctcgttcgtaatccatttccattagtgactgtatcctcaaacatcctctatcgacggcttcttgtatttcctgttccgttaacatctcttcattaatgagcgtaaacaataatcgtttaccacttaaatcgatataacagtaacttgtatgcgagattgggttaataaatacagaaggaaacttcttatcgaagtgacactctatatctagaaataagtacgatcttgggatatcgaatctaggtatttttttagcgaaacagttacgtggatcgtcacaatgataacatccattgttaatctttgtcaaatattgctcgtccaacgagtaacatccgtctggagatatcccgttagaaatataaaaccaactaatattgagaaattcatccatggtggcattttgtatgctgcgtttctttggctcttctatcaaccacatatctgcgacggagcattttctatctttaatatctagattataacttattgtctcgtcaatgtctatagttctcatctttcccaacggcctcgcattaaatggaggaggagacaatgactgatatatttcgtccgtcactacgtaataaaagtaatgaggaaatcgtataaatacggtctcgccatttcgacatctggatttcagatataaaaatctgttttcaccgtgactttcaaaccaattaatgcaccgaacatccatttatagaatttagaaatatattttcatttaaatgaatcccaaacattggggaagagccgtatggaccattatttttatagtactttcgcaagcgggtttagacggcaacatagaagcgtgtaaacgaaaactatatactatagttagcactcttccatgtcctgcatgtagacggcacgcgactatcgctatagaggacaataatgtcatgtctagcgatgatctgaattatatttattattttttcatcagattatttaacaatttggcatctgatcccaaatacgcgatcgatgtgacaaaggttaaccctttataaacttaacccattataaaacttatgattagtcacaactgaaataaccgcgtgattattttttggtataattctacacggcatggtttctgtgactatgaattcaacccccgttacattagtgaaatctttaacaaacagcaagggttcgtcaaagacataaaactcattgtttacaatcgaaatagaccccctatcacacttaaaataaaaaatatccttatcctttaccaccaaataaaattctgattggtcaatgtgaatgtattcacttaacagttccacaaatttatttattaactccgaggcacatacatcgtcggtattttttatggcaaactttactcttccagcatccgtttctaaaaaaatattaacgagttccatttatatcatccaatattattgaaatgacgttgatggacagatgatacaaataagaaggtacggtacctttgtccaccatctcctccaattcatgctctattttgtcattaactttaatgtatgaaaacagtacgccacatgcttccatgacagtgtgtaacactttggatacaaaatgtttgacattagtataattgtccaagactgtcaatctataatagatagtagctataatatattctatgatggtattgaagaagatgacaaccttggcatattgatcatttaacacagacatggtatcaacagatagcttgaatgaaagagaatcagtaattggaataagcgtcttctcgatagagtgtccgtataccaacatgtctgatattttgatgtattccattaaattatttagttttttctttttattctcgttaaacagcatttctgtcaacggaccccaacatcgttgaccgattaagttttgattgatttttccgtgtaaggcgtatctagtcagatcgtatagcctatccaataatccatcgtctgtgtgtagatcacatcgtacactttttaattctctatagaagagcgacagacatctggagcaattacagacagcaatttctttattctctacagatgtaagatacttgaagacattcctatgatgatgcagaattttggataacacggtattgatggtatctgttaccataattcctttgatggctgatagtgtcagagcacaagatttccaatctttgacaatttttagcaccattatctttgttttgatatctatatcagacagcatggtgcgtctgacaacacagggattaagacggaaagatgaaatgattctctcaacatcttcaatagataccttgctattttttctggcattatctatatgtgcgagaatatcctctagagaatcagtatcctttttgatgatagtggatctcaatgacatgggacgtttaaaccttcttattctatcaccagattgcatggtgatttgtcttctttcttttatcataatgtaatctctaaattcatcggcaaattgtctatatctaaaatcataatatgagatgtttacctctacaaatatctgttcgtccaatgttagagtatttacatcagttttgtattccaaattaaacatggcaacggatttaattttatattcctctattaagtcctcgtcgataataacagaatgtagataatcatttaatccgtcgtacatggttggaagatgcttgttgacaaaatctttaattgtcttgatgaaggtgggactatatctaacatcttgattaataaaatttataacattgtccataggatactttgtaactagttttatacacatctcttcatcggtaagtttagacagaatatcgtgaacaggtggtatattatattcatcagatatacgaagaacaatgtccaaatctatattgtttaatatattatatagatgtagcgtagctcctacaggaatatctttaactaagtcaatgatttcatcaaccgttagatctattttaaagttaatcatataggcattgatttttaaaaggtatgtagccttgactacattctcattaattaaccattccaagtcattgtgtgtaagaagattatattctatcataagcttgactacatttggtcccgataccattaaagaattcttatgatataaggaaacagattttaggtactcatctactctacaagaattttggagagccttaacgatatcagtgacgtttattatttcaggaggaaagaatctaacattgagaatatcggaattaatagcttccagatacagtgattttggcaatagtccgtgtaatccataatccagtaacacgagctggtgcttgctagacaccttttcaatgtttaatttttttgaaataagctttgataaagccttcctcgcaaattccggatacatgaacatgtcggcgacatgattaagtattgttttttcattatttttatattttctcaacaagttctcaataccccaatagatgatagaatatcacccaatgcgtccatgttgtctatttccaacaggtcgctatatccaccaatagaagtttttccaaaaaagattctaggaacagttctaccaccagtaatttgttcaaaataatcccgcaattcattttcgggtttaaattctttaatatcgacaatttcatacgctcctcttttgaaactaaacttatttagaatatccagtgcatttctacaaaaaggacatgtatacttgacaaaaattgtcactttgttattggccaacctttgttgtacaaattcctcggccattttaatatttaagtgatataaaactatctcgacttatttaactctttagtcgagatatatggacgcagatagctatatgatagccaactacagaaggcaaacgctataaaaaacataattacgacgagcatatttataaatatttttattcagcattacttgatatagtaatattaggcacagtcaaacattcaaccactctcgatacattaactctctcattttctttaacaaattctgcaatatcttcgtaaaaagattcttgaaactttttagaatatctatcgactctagatgaaatagcgttcgtcaacatactatgttttgtatacataaaggcgcccattttaacagtttctagtgacaaaatgctagcgatcctaggatcctttagaatcacatagattgacgattcgtctctcttagtaactctagtaaaataatcatacaatctagtacgcgaaataatattatccttgacttgaggagatctaaacaatctagttttgagaacatcgataagttcatcgggaatgacatacatactatctttaatagaactcttttcatccagttgaatggattcgtccttaaccaactgattaatgagatcttctattttatcattttccagatgatatgtatgtccattaaagttaaattgtgtagcgcttctttttagtctagcagccaatactttaacatcactaatatcgatatacaaaggagatgatttatctatggcattaagaattcgtttttcgacatccgtcaaaaccaattcctttttgcctgtatcatccagttttccatcctttgtaaagaaattattttctactagactattaataagactgataaggattcctccataattgcacaatccaaactttttaacaaaactagactttacgagatctacaggaatgcgtacttcaggttttttagcttgtgattttttcttttgcggacattttctagtaaccaactcatctaccatttcattgattttagcagtgaaataagctttcaatgcacgggcactgatactattgaaaacgagttgatcttcaaattccgccatttaagttcaccaaacaacttttaaatacaaatatatcaatagtagtagaataagaactataaaaaaaataataattaaccaaccccaacaaccggtattattagttgatgtggtagttttctcatcacttagaacagatttaacaatttctataaagtctgtcaaatcatcttccggagaccccataaatacaccaaatatagcggcgtacaacttatccatttatacattgaatattggcttttctttatcgctatcttcatcatattcatcatcaatatcaacaagtcccagattacgagccagatcttcttctacattttcagtcattgatacacgttcactatctccagagagtccgataacgttagccaccacttctctatcaatgattagtttcttgagcgcgaaagtaatttttgtttccgttccggatctatagaagacgataggtgtgataattgccttggccaattgtctttctcttttactgagtgattctagttcaccttctatagatctgagaatggatgattctccagtcgaaacatattctaccatggatccgtttaatttgttgatgaagatggattcatccttaaatgttttctctgtaatagtttccaccgaaagactatgcaaagaatttggaatgcgttccttgtgcttaatgtttccatagacggcttctagaagttgatacaacataggactagccgcggtaacttttatttttagaaagtatccatcgcttctatcttgtttagatttatttttataaagtttagtctctccttccaacataataaaagtggaagtcatttgactagataaactatcagtaagttttatagagatagacgaacaattagcgtattgagaagcatttagtgtaacgtattcgatacattttgcattagatttactaatcgattttgcatactctataacacccgcacaagtctgtagagaatcgctagatgcagtaggtcttggtgaagtttcaactctcttcttgattaccttactcatgattaaacctaaataattgtactttgtaatataatgatatatattttcactttatctcatttgagaataaaaatgtttttgtttaaccactgcatgatgtacagatttcggaatcgcaaaccaccagtggttttattttatccttgtccaatgtgaattgaatgggagcggatgcgggtttcgtacgtagatagtacattcccgtttttagaccgagactccatccgtaaaaatgcatactcgttagtttggaataactcggatctgctatatggatattcatagattgactttgatcgatgaaggctcccctgtctgcagccatttttatgatcgtcttttgtggaatttcccaaatagttttataaactcgcttaatatcttctggaaggtttgtattctgaatggatccaccatctgccataatcctattcttgatctcatcattccataattttctctcggttaaaactctaaggagatgcggattaactacttgaaattctccagacaatactctccgagtgtaaatattactggtatacggttccaccgactcattatttcccaaaatttgagcagttgatgcagtcggcataggtgccaccaataaactatttctaagaccgtatgttctgattttatcttttagaggttcccaattccaaagatccgacggtacaacattccaaagatcatattgtagaataccgttactggcgtacgatcctacatatgtatcgtatggtccttccttctcagctagttcacaactcgcctctaatgcaccgtaataaatggtttcgaagatcttcttatttagatcttgtgcttccaggctatcaaatggataatttaagagaataaacgcgtccgctaatccttgaacaccaataccgataggtctatgtctcttattagagatttcagcttctggaataggataataattaatatctataattttattgagatttctgacaattactttgaccacatccttcagtttgagaaaatcaaatcgcccatctattacaaacatgttcaaggcaacagatgccagattacaaacggctacctcattagcatccgcatattgtattatctcagtgcaaagattactacacttgatagttcctaaattttgttgattactctttttgttacacgcatccttataaagaatgaatggagtaccagtttcaatctgagattctataatcgctttccagacgactcgagcctttattatagatttgtatctcctttctctttcgtatagtgtatacaatcgttcgaactcgtctccccaaacattgtccaatccaggacattcatccggacacatcaacgaccactctccgtcatccttcactcgtttcataaagagatcaggaatccaaagagctataaatagatctctggttctatgttcctcgtttcctgtattctttttaagatcgaggaacgccataatatcagaatgccacggttccaagtatatggccataactccaggccgtttgtttcctccctgatctatgtatctagcggtgttattataaactctcaacattggaataataccgtttgatataccattggtaccggagatatagcttccactggcacgaatattactaattgatagacctattccccctgccattttagagattaatgcgcatcgttttaacgtgtcatagataccctctatgctatcatcgatcatgttaagtagaaaacagctagacatttggtgacgactagttcccgcattaaataaggtaggagaagcgtgcgtaaaccatttttcagaaagtagattgtacgtctcaatagctgagtctatatcccattgatgaattcctactgcgacacgcattaacatgtgctgaggtctttcaacgatcttgttgtttattttcaacaagtaggatttttccaaagttttaaaaccaaaatagttgtatgaaaagtctcgttcgtaaataataaccgagttgagtttatccttatatttgttaactatatccatggtgatacttgaaataatcggagaatgtttcccatttttaggattaacatagttgaataaatcctccatcacttcactaaatagtttttttgtttccttgtgtagatttgatacggctattctggcggctagaatggcataatccggatgttgtgtagtacaagtggctgctatttcggctgccagagtgtccaattctaccgttgttactccattatatattccttgaataaccttcatagctattttaataggatctatatgatccgtgtttaagccataacataattttctaatacgagacgtgattttatcaaacatgacattttccttgtatccatttcgtttaatgacaaacatttttgttggtgtaataaaaaaattatttaacttttcattaatagggatttgacgtatgtagcgtacaaaatgattgttcctggtatatagataaagagtcctatatatttgaaaatcgttacggctcgattaaactttaatgattgcatagtgaatatatcattaggatttaactccttgactatcatggcggcgccagaaattaccatcaaaagcattaatacagttataccgatcgcagttagaacggttatagcatccaccatttatatctaaaaattagatcaaagaatatgtgacaaagtcctagttgtatactgagaattgacgaaacaatgtttcttacatatttttttcttattagtaaccgacttaatagtaggaactggaaaactagacttgattattctataagtatagatacccttccaaataatattctctttgataaaagttccagaaaatgtagaattttttaaaaagttatcttttgctattaccaagattgtgtttagacgcttattattaatatgagtgatgaaatccacaccgcctctagatatcgcctttatttccacattagatggtaaatccaatagtgaaactatctttttaggaatgtatggactcgcgtttagaggagtaaacgtcttaggcgtcggaaaggatgattcatcaaacgaataaacaatttcacaaatggatgttaatgtattagtaggaaattttttgacgctattggaattgaagattctaatggatgatgttctacctatttcatccgataacatgttaatttccgacaccaacggttttaatatttcgatgatatacggtagtctctctttcggacttatatagcttattccacaatacgagtcattatatactccaaaaaacaaaataactagtataaaatctgtatcgaatgggaaaaacgaaattatcgacataggtatagaatccggaacattgaacgtattaatacttaattctttttctgtggtaagtaccgataggttattgacattgtatggttttaaatattctataacttgagacttgatagatattagtgatgaattgaaaattatttttatcaccacgtgtgtttcaggatcatcgtcgacgcccgtcaaccaaccgaacggagtaaaataaatatcattaatatatgctctagatattagtatttttatcaatcctttgattatcatcttctcgtaggcgaatgattccatgatcaagagtgatttaagaacatcctccggagtattaatgggcttagtaaacagtccatcgttgcaataataaaagttatccaagttaaaggatattatgcattcgtttaaagatatcacctcatctgacggagacaattttttggtaggttttagagactttgaagctacttgtttaacaaagttattcatcgtcgtctactattctatttaattttgtagttaatttatcacatatcacattaattgactttttggtccacttttccatacgtttatattcttttaatcctgcgttatccgtttccgttatatccagggatagatcttgcaagttaaatagaatgctcttaaataatgtcattttcttatccgctaaaaatttaaagaatgtataaacctttttcagagatttgaaactcttaggtggtgtcctagtacacaatatcataaacaaactaataaacattccacattcagattccaacagctgattaacttccacattaatacagcctattttcgctccaaatgtacattcgaaaaatctgaataaaacatcgatgtcacaatttgtattatccaatacagaatgtttgtgattcgtgttaaaaccatcggagaaggaatagaaataaaaattattatagtggtggaattcagttggaatattgcctccggagtcataaaaggatactaaacattgttttttatcataaattacacatttccaatgagacaaataacaaaatccaaacattacaaatctagaggtagaacttttaattttgtctttaagtatatacgataagatatgtttattcataaacgcgtcaaatttttcatgaatcgctaaggagtttaagaatctcatgtcaaattgtcctatataatccacttcggatccataagcaaactgagagactaagttcttaatacttcgattgctcatccaggctcctctctcaggctctattttcatcttgacgacctttggattttcaccagtatgtattcctttacgtgataaatcatcgattttcaaatccatttgtgagaagtctatcgccttagatactttttcccgtagtcgaggtttaaaaaaatacgctaacggtatactagtaggtaactcaaagacatcatatatagaatggtaacgcgtctttaactcgtcggttaactctttcttttgatcgagttcgtcgctactattgggtctgctcaggtgccccgactctactagttccaacatcataccgataggaatacaagacactttgccggcggttgtagatttatcatatttttccactacatatccgttacaatttgttaaaaatttagatacatctatattgctacataatccagctagtgaatatatatgacataataaattggtaaatcctagttctggtattttactaattactaaatctgtatatctttccatttatcatggaaaagaatttaccagatatcttcttttttccaaactgcgttaatgtattctcttacaaatattcacaagatgaattcagtaatatgagtaaaacggaacgtgatagtttctcattggccgtgtttccagttataaaacatagatggcataacgcacacgttgtaaaacataaaggaatatacaaagttagtacagaagcacgtggaaaaaaagtatctcctccatcactaggaaaacccgcacacataaacctaaccgcgaagcaatatatatacagtgaacacacaataagctttgaatgttatagttttctaaaatgtataacaaatacagaaatcaattcgttcgatgagtatatattaagaggactattagaagctggtaatagtttacagatattttccaattccgtaggtaaacgaacagatactataggtgtactagggaataagtatccatttagcaaaattccattggcctcattaactcctaaagcacaacgagagatattttcagcgtggatttctcatagacctgtagttttaactggaggaactggagtgggtaagacgtcacaggtacccaagttattgctttggtttaattatttatttggtggattctctactctagataaaatcactgactttcacgaaagaccagtcattctatctcttcctaggatagctttagttagattgcatagcaataccattttaaaatcattgggatttaaggtactagatggatctcctatttctttacggtacggatctataccggaagaattaataaacaaacaaccaaaaaaatatggaattgtattttctacccataagttatctctaacaaaactatttagttatggcactcttattatagacgaagttcatgagcatgatcaaataggagatattattatagcagtagcgagaaagcatcatacgaaaatagattctatgtttttaatgactgccacgttagaggatgacagggaacggctaaaagtatttttacctaatcccgcatttatacatattcctggagatacactgtttaaaattagcgaggtatttattcataataagataaatccatcttccagaatggcatacatagaagaagaaaagagaaatttagttactgctatacagatgtatactcctcctgatggatcatccggtatagtctttgtggcatccgttgcacagtgtcacgaatataaatcatatttagaaaaaagattaccgtatgatatgtatattattcatggtaaggtcttagatatagacgaaatattagaaaaagtgtattcatcacctaatgtatcgataattatttctactccttatttggaatccagcgttactatacgcaatgttacacacatttatgatatgggtagagtttttgtccccgctccttttggaggatcgcaacaatttatttctaaatctatgagagatcaacgaaaaggaagagtaggaagagttaatcctggtacatacgtctatttctatgatctgtcttatatgaagtctatacagcgaatagattcagaatttctacataattatatattgtacgctaataagtttaatctaacactccccgaagatttgtttataatccctacaaatttggatattctatggcgtacaaaggaatatatagactcgttcgatattagtacagaaacatggaataaattattatccaattattatatgaagatgatagagtatgctaaactttatgtactaagtcctattctcgctgaggagttggataactttgagaggacgggagaattaactagtattgtacgagaagccattttatctctaaatttacaaattaagattttaaattttaaacataaagatgatgatacgtatatacacttttgtaaaatattattcggtgtctataacggaacaaacgctactatatattatcatagacctctaacgggatatatgaatatgatttcagatactatatttgttcctgtagataataactaaaaatcaaactctaatgaccacatctttttttagagatgaaaaattttccacatctccttttgtagacacgactaaacattttgcagaaaaaagtttattagtgtttagataatcgtatacttcatcagtgtagatagtaaatgtgaacagataaaaggtattcttgctcaatagattggtaaattccatagaatatattaatcctttcttcttgagatcccacatcatttcaaccagagacgttttatccaatgatttacctcgtactataccacatacaaaactagattttgcagtgacgtcgtacctggtattcctaccaaacaaaattttacttttagttcttttagaaaattctaaggtagaatctctatttgccaatatgtcatctatggaattaccactagcaaaaaatgatagaaatatatattgatacatcgcagctggttttgatctactatactttaaaaacgaatcagattccataattgcctgtatatcatcagctgaaaaactatgttttacacgtattccttcggcatttctttttaatgatatatcttgtttagacaatgataaagttatcatgtccatgagagacgcgtctccgtatcgtataaatatttcattagatgttagacgcttcattaggggtatacttctataaggtttcttaatcagtccatcattggttgcgtcaagaactactatcggatgttgttgggtatctctagtgttacacatggccttactaaagtttgggtaaataactatgatatctctattaattatagatgcatatatttcattcgtcaaggatattagtatcgacttgctatcgtcattaatacgtgtaatgtaatcatataaatcatgcgatagccaaggaaaatttaaatagatgttcatcatataatcgtcgctataattcatattaatacgttgacattgactaatttgtaatatagcctcgccacgaagaaagctctcgtattcagtttcatcgataaaggataccgttaaatataactggttgccgatagtctcatagtctattaagtggtaagtttcgtacaaatacagaatccctaaaatattatctaatgttggattaatctttaccataactgtataaaatggagacggagtcataactattttaccgtttgtacttactggaatagatgaaggaataatctccggacatgctggtaaagacccaaatgtctgtttgaagaaatccaatgttccaggtcctaatctcttaacaaaaattacgatattcgatcccgatatcctttgcattctatttaccagcatatcacgaactatattaagattatctatcatgtctattctcccaccgttatataaatcgcctccgctaagaaacgttagtatatccatacaatggaatacttcatttctaaaatagtattcgttttctaattctttaatgtgaaatcgtatactagaaagggaaaaattatctttgagttttccgttagaaaagaaccacgaaactaatgttctgattgcgtccgattccgttgctgaattaatggatttacaccaaaaactcatataacttctagatgtagaagcattcgctaaaaaattagtagaatcaaaggatataagtagatgttccaacaagtgagcaattcccaagatttcatctatatcattctcgaatccgaaattagaaattcccaagtagatatcctttttcatccgatcgttgatgaaaatacgaactttattcggtaagacaatcatttactaaggagtaaaataggaagtaatgttcgtatgtcgttatcatcgtataaattaaaggtgtgttttttaccattaagtgacattataattttaccaatattggaattataatataggtgtatttgcgcactcgcgacggttgatgcatcggtaaatatagctgtatctaatgttctagtcggtatttcatcatttcgctgtctaataatagcgttttctctatctgtttccattacagctgcctgaagtttattggtcggataatatgtaaaataataagaaatacatacgaataacaaaaataaaataagatataataaagatgccatttagagatctaattttgtttaacttgtccaaattcctacttacagaagatgaggaatcgttggagatagtgtcttccttatgtagaggatttgaaatatcttataatgacttgataacttactttccagataggaaataccataaatatatttataaagtatttgaacatgtagatttatcggaggaattaagtatggaattccatgatacaactctgagagatttagtctatcttagattgtacaagtattccaagtgtatacggccgtgttataaattaggagataatctaaaaggcatagttgttataaaggacaggaatatttatattagggaagcaaatgatgacttgatagaatatctcctcaaggaatacactcctcagatttatacatattctaatgagcgcgtccccataactggttcaaaattaattctttgtggattttctcaagttacatttatggcgtatacaacgtcgcatataacaacaaataaaaaggtagatgttctcgtttccaaaaaatgtatagatgaactagtcgatccaataaattatcaaatacttcaaaatttatttgataaaggaagcggaacaataaacaaaatactcaggaagatattttattcggtaacaggtggccaaactccataggtagctttttctatttcggattttagaatttccaaattcaccagcgatttatcggttttggtgaaatccaaggatttattaatgtccacaaatgccatttgttttgtctgtggattgtatttgaaaatggaaacgatgtagttagatagatgcgctgcgaagtttcctattagggttccgcgcttcacgtcacccagcatacttgaatcaccatcctttaaaaaaaatgataagatatcaacatggagtatatcatactcgaattttaattcttctactgactcactgacattttcacaaatactacaatacggtttaccgaaaataatcagtacgttcttcatttatgggtatcaaaaacttaaaatcgttactgctggaaaataaatcactgacgatattagatgataatttatacaaagtatacaatggaatatttgtggatacaatgagtatttatatagccgtcgccaattgtgtcagaaacttagaagagttaactacggtattcataaaatacgtaaacggatgggtaaaaaagggagggcatgtaaccctttttatcgatagaggaagtataaaaattaaacaagacgttagagacaagagacgtaaatattctaaattaaccaaggacagaaaaatgttagaattagaaaagtgtacatccgaaatacaaaatgttaccggatttatggaagaagaaataaaggcagaaatgcaattaaaaatcgataaactcacatttcaaatatatttatctgattctgataacataaaaatatcattgaatgagatactaacacatttcaacaataatgagaatgttacattattttattgtgatgaacgagacgcagaattcgttatgtgtctcgaggctaaaacacatttctctaccacaggagaatggccgttgataataagtaccgatcaggatactatgctatttgcatctgctgataatcatcctaagatgataaaaaacttaactcaactgtttaaatttgttccctcggcagaggataactatttagcaaaattaacggcgttagtgaatggatgtgatttctttcctggactctatggggcatctataacacccaccaacttaaacaaaatacaattgtttagtgattttacaatcgataatatagtcactagtttggcaattaaaaattattatagaaagactaactctaccgtagacgtgcgtaatattgttacgtttataaacgattacgctaatttagacgatgtctactcgtatattcctccttgtcaatgcactgttcaagaatttatattttccgcattagatgaaaaatggaatgaatttaaatcatcttatttagaaagcgtgccgttaccctgccaattaatgtacgcgttagaaccacgcaaggagattgatgtttcagaagttaaaactttatcatcttatatagatttcgaaaatactaaatcagatatcgatgttataaaatctatatcctcgatcttcggatattctaacgaaaactgtaacacgatagtattcggcatctataaggataatttactactgagtataaataattcattttactttaacgatagtctgttaataaccaatactaaaagtgataatataataaatataggttactagattaaaaatggtgttccaactcgtgtgctctacatgcggtaaagatatttctcacgaacgatataaattgattatacgaaaaaaatcattaaaggatgtactcgtcagtgtaaagaacgaatgttgtaggttaaaattatctacacaaatagaacctcaacgtaacttaacagtgcaacctctattggatataaactaatatggatccggttaattttatcaagacatatgcgcctagaggttctattatttttattaattataccatgtcattaacaagtcatttgaatccatcgatagaaaaacatgtgggtatttattatggtacgttattatcggaacacttggtagttgaatctacctatagaaaaggagttcgaatagtcccattggatagtttttttgaaggatatcttagtgcaaaagtatacatgttagagaatattcaagttatgaaaatagcagctgatacgtcattaactttattgggtattccgtatggatttggtcatgatagaatgtattgttttaaattggtagctgactgttataaaaatgccggtattgatacatcgtctaaacgaatattgggcaaagatatttttctgagccaaaacttcacagacgataatagatggataaagatatatgattctaataatttaacattttggcaaattgattaccttaaagggtgagttaatatgcataactactcctccgttgttttttccctcgttctttttcttaacgttgtttgccatcactctcataatgtaaagatattctaaaatggtaaacttttgcatatcggacgcagaaattggtataaatgttgtaattgtattatttcccgtcaatggactagtcacagctccatcagttttatatcctttagagtatttctcactcgtgtctaacattctagagcattccatgatctgtttatcgttgatattggccggaaagatagattttttattttttattatattactattggcaattgtagatataacttctggtaaatatttttctaccttttcaatctcttctattttcaagccggctatatattctgctatattgttgctagtatcaataccttttctggctaagaagtcatatgtggtattcactatatcagttttaactggtagttccattagcctttccacttctgcagaataatcagaaattggttctttaccagaaaatccagctactataataggctcaccgatgatcattggcaaaatcctatattgtaccagattaatgagagcatatttcatttccaataattctgctagttcttgagacattgatttatttgatgaatctagttggttctctagatactctaccatttctgccgcatacaataacttgttagataaaatcagggttatcaaagtgtttagcgtggctagaatagtgggcttgcatgtattaaagaatgcggtagtatgagtaaaccgttttaacgaattatatagtctccagaaatctgtggcgttacatacatgagccgaatgacatcgaagattgtccaatatttttaatagctgctctttgtccattatttctatatttgactcgcaacaattgtagataccattaatcaccgattcctttttcgatgccggacaatagcacaattgtttagctttggactctatgtattcagaattaatagatatatctctcaatacagattgcactatacattttgaaactatgtcaaaaattgtagaacgacgctgttctgcagccatttaactttaaataatttacaaaaatttaaaatgagcatccgtataaaaatcgataaactgcgccaaattgtggcatatttttcagagttcagtgaagaagtgtctataaatgtagactcgacggatgagttaatgtatatttttgccgccttgggcggatctgtaaacatttgggcaattatacctctaagtgcatcagtgttttaccgaggagccgaaaatattgtgtttaatcttcctgtgtccaaggtaaaatcgtgtttgtgtagttttcacaatgatgccatcatagatatagaacctgatctggaaaataatctagtaaaactttctagttatcatgtagtaagtgtcgattgtaacaaggaactgatgcctattaggacagatactactatttgtctaagtatagatcaaaagaaatcttacgtgtttaattttcacaagtatgaagaaaaatgttgtggtagaaccgtcattcatctagaatggttgttgggctttatcaagtgtattagtcagcatcagcatctggctattatgtttaaagatgacaatattattatgaagactcctggtaatactgatgcgttttccagggaatattctatgactgaatgttctcaagaactacaaaagttttctttcaaaatagctatctcgtctctcaacaaactacgaggattcaaaaagagagtcaatgtttttgaaactagaatcgtaatggataatgacgataacattttaggaatgttgttttcggatagagttcaatcctttaagatcaacatctttatggcgtttttagattaatactttcaatgagataaatatgggtggcggagtaagtgttgagctccctaaacgggatccgcctccgggagtacccactgatgagatgttattaaacgtggataaaatgcatgacgtgatagctcccgctaagcttttagaatatgtgcatataggaccactagcaaaagataaagaggataaagtaaagaaaagatatccagagtttagattagtcaacacaggacccggtggtctttcggcattgttaagacaatcgtataatggaaccgcacccaattgctgtcgcacttttaatcgtactcattattggaagaaggatggaaagatatcagataagtatgaagagggtgcagtattagaatcgtgttggccagacgttcacgacactggaaaatgcgatgttgatttattcgactggtgtcagggggatacgttcgatagaaacatatgccatcagtggatcggttcagcctttaataggagtaatagaactgtagagggtcaacaatcgttaataaatctgtataataagatgcaaacattatgtagtaaagatgctagtgtaccaatatgcgaatcatttttgcattatttacgcgcacacaatacagaagatagcaaagagatgatcgattatattctaagacaacagtctgcggactttaaacagaaatatatgagatgtagttatcccactagagataagttagaagagtcattaaaatatgcggaacctcgagaatgttgggatccagagtgttcgaatgccaatgttaatttcttactaacacgtaattataataatttaggactttgcaatattgtacgatgtaataccagcgtgaacaacttacagatggataaaacttcctcattaagattgtcatgtggattaagcaatagtgatagattttctactgttcccgtcaatagagcaaaagtagttcaacataatattaaacactcgttcgacctaaaattgcatttgatcagtttattatctctcttggtaatatggatactaattgtagctatttaaatgggtgccgcggcaagcatacagacgacggtgaatacactcagcgaacgtatctcgtctaaattagaacaagaagcgaacgctagtgctcaaacaaaatgtgatatagaaatcggaaatttttatatccgacaaaaccatggatgtaacctcactgttaaaaatatgtgctctgcggacgcggatgctcagttggatgctgtgttatcagccgctacagaaacatatagtggattaacaccggaacaaaaagcatacgtgccagctatgtttactgctgcgttaaacattcagacgagtgtaaacactgttgttagagattttgaaaattatgtgaaacagacttgtaattctagcgcggtcgtcgataacaaattaaagatacaaaacgtaatcatagatgaatgttacggagccccaggatctccaacaaatttggaatttattaatacaggatctagcaaaggaaattgtgccattaaagcgttgatgcaattgacgactaaggccactactcaaatagcacctagacaagttgctggtacaggagttcagttttatatgattgttatcggtgttataatattggcagcgttgtttatgtactatgccaagcgtatgttgttcacatccaccaatgataaaatcaaacttattttagccaataaggaaaacgtccattggactacttacatggacacattctttagaacttctccgatggttattgctaccacggatatgcaaaactgaaaatatattgataatattttaatagattaacatggaagttatcgctgatcgtctagacgatatagtgaaacaaaatatagcggatgaaaaatttgtagattttgttatacacggtctagagcatcaatgtcctgctatacttcgaccattaattaggttgtttattgatatactattatttgttatagtaatttatatttttacggtacgtctagtaagtagaaattatcaaatgttgttggtggtgctagtcatcacattaactattttttattactttatactataatagtactagactgacttctaacaaacatctcacctgccataaataaatgcttgatattaaagtcttctatttctaacactattccatctgtggaaaataatactctgacattatcgctaattgacacatcggtgagtgatatgcctataaagtaataatcttctttgggcacatataccagtgtaccaggttctaacaacctatttactggtgctcctgtagcatactttttctttaccttgagaatatccatcgtttgcttggtcaatagcgatatgtgattttttatcaaccactcaaaaaagtaattggagtgttcatatcctctacgggctattgtctcatggccgtgtatgaaatttaagtaacacgactgtggtagatttgttctatagagccgattgccgcaaatagatagaactaccaatatgtctgtacaaatgttaaacattaattgattaacagaaaaaacaatgttcgttctgggaatagaaaccagatcaaaacaaaattcgttagaatatatgccacgtttatacatggaatataaaataactacagtttgaaaaataacagtatcatttaaacatttaacttgcggggttaatctcacaactttactgtttttgaactgttcaaaatatagcatcgatccgtgagaaatacgtttagccgcctttaatagaggaaatcccaccgcctttctggatctcaccaacgacgatagttctgaccagcaactcatttcttcatcatccacctgttttaacatataataggcaggagatagatatccgtcattgcaatattccttctcgtaggcacacaatctaatattgataaaatctccattctcttctctgcatttattatcttgtctcggtggctgattaggctgtggtcttggtttaggccttggtctatcgttgttgaatctattttggtcattaaatctttcatttcttcctggtatatttctatcacctcgtttggttggatttttgtctatattatcgtttgtaacatcggtacgggtattcatttatcacaaaaaaaacttctctaaatgagtctactgctagaaaacctcatcgaagaagataccatattttttgcaggaagtatatctgagtatgatgatttacaaatggttattgccggcgcaaaatccaaatttccaagatctatgctttctatttttaatatagtacctagaacgatgtcaaaatatgagttggagttgattcataacgaaaatatcacaggagcaatgtttaccacaatgtataatataagaaacaatttgggtctaggagatgataaactaactattgaagccattgaaaactatttcttggatcctaacaatgaagttatgcctcttattattaataatacggatatgactgccgtcattcctaaaaaaagtggtaggagaaagaataagaacatggttatcttccgtcaaggatcatcacctatcttgtgcattttcgaaactcgtaaaaagattaatatttataaagaaaatatggaatccgcgtcgactgagtatacacctatcggagacaacaaggctttgatatctaaatatgcgggaattaatgtcctgaatgtgtattctccttccacatccataagattgaatgccatttacggattcaccaataaaaataaactagagaaacttagtactaataaggaactagaatcgtatagttctagccctcttcaagaacccattaggttaaatgattttctgggactattggaatgtgttaaaaagaatattcctctaacagatattccgacaaaggattgattactataaatggagaatgttcctaatgtatactttaatcctgtgtttatagagcccacgtttaaacattctttattaagtgtttataaacacagattaatagttttatttgaagtattcgttgtattcattctaatatatgtattttttagatctgaattaaatatgttcttcatgcctaaacgaaaaatacccgatcctattgatagattacgacgtgctaatctagcgtgtgaagacgataaattaatgatctatggattaccatggatgacaactcaaacatctgcgttatcaataaatagtaaaccgatagtgtataaagattgtgcaaagcttttgcgatcaataaatggatcacaaccagtatctcttaacgatgttcttcgcagatgatgattcattttttaagtatttggctagtcaagatgatgaatcttcattatctgatatattgcaaatcactcaatatctagactttctgttattattattgatccaatcaaaaaataaattagaagctgtgggtcattgttatgaatctctttcagaggaatacagacaattgacaaaattcacagactttcaagattttaaaaaactgtttaacaaggtccctattgttacagatggaagggtcaaacttaataaaggatatttgttcgactttgtgattagtttgatgcgattcaaaaaagaatcctctctagctaccaccgcaatagatcctgttagatacatagatcctcgtcgcaatatcgcattttctaacgtgatggatatattaaagtcgaataaagtgaacaataattaattctttattgtcatcatgaacggcggacatattcagttgataatcggccccatgttttcaggtaaaagtacagaattaattagacgagttagacgttatcaaatagctcaatataaatgcgtgactataaaatattctaacgataatagatacggaacgggactatggacgcatgataagaataattttgaagcattggaagcaactaaactatgtgatgtcttggaatcaattacagatttctccgtgataggtatcgatgaaggacagttctttccagacattgtttaattctgtgagcgtatggcaaacggtaccgagctcttttttttttttttttttttggcatataaataagtcgactccctatcagtgatagagaatgttcttggctgttttgtattgccttctgtggagtttccagatctctgatggccattttcctcgagcctgtgcctcctctaagaacttgttggcaaaagaatgctgcccaccatggatgggtgatgggagtccctgcggccagctttcaggcagaggttcctgccaggatatccttctgtccagtgcaccatctggacctcagttccccttcaaaggggtggatgaccgtgagtcctggccctctgtgttttataataggacctgccagtgctcaggcaacttcatgggtttcaactgcggaaactgtaagtttggatttgggggcccaaattgtacagagaagcgagtcttgattagaagaaacatttttgatttgagtgtctccgaaaagaataagttcttttcttacctcactttagcaaaacatactatcagctcagtctatgtcatccccacaggcacctatggccaaatgaacaatgggtcaacacccatgtttaatgatatcaacatctacgacctctttgtatggatgcattactatgtgtcaagggacacactgcttgggggctctgaaatatggagggacattgattttgcccatgaagcaccagggtttctgccttggcacagacttttcttgttattgtgggaacaagaaattcgagaactaactggggatgagaacttcactgttccatactgggattggagagatgcagaaaactgtgacatttgcacagatgagtacttgggaggtcgtcaccctgaaaatcctaacttactcagcccagcatccttcttctcctcctggcagatcatttgtagcagatcagaagagtataatagccatcaggttttatgcgatggaacacctgagggaccactattacgtaatcctggaaaccatgacaaagccaaaacccccaggctcccatcttcagcagatgtggaattttgtctgagtttgacccagtatgaatctggatcaatggatagaactgccaatttcagctttagaaacacactggaaggatttgccagtccactcacagggatagcagatccttctcaaagtagcatgcacaatgccttacatatctttatgaatggaacaatgtcccaagtacagggatcggccaacgatcccatttttcttcttcaccatgcttttgtggacagtatttttgaacaatggctgcgaaggcaccgccctcttttggaagtttacccagaagccaatgcacctatcggccataacagagactcttacatggttcctttcataccgctctatagaaatggtgatttcttcataacatccaaggatctgggatatgactacagctacctccaagagtcagatccaggcttttacagaaattatattgagccttacttggaacaagccagtcgtatctggccatggcttcttggggcagcactggtgggagctgttattgctgcagctctctctgggcttagcagtaggctatgccttcagaagaagaagaagaagaagcaaccccaggaggaaaggcagccactcctcatggacaaagacgactaccacagcttgctgtatcagagccatctgtgattaattaatttttatcgatctaattcaacaatgtctggagagctcggatccttctgtgagcgtatggcaaacgaaggaaaaatagttatagtagccgcactcgatgggacatttcaacgtaaaccgtttaataatattttgaatcttattccattatctgaaatggtggtaaaactaactgctgtgtgtatgaaatgctttaaggaggcttccttttctaaacgattgggtgaggaaaccgagatagaaataataggaggtaatgatatgtatcaatcggtgtgtagaaagtgttacatcgactcataatattatattttttatctaaaaaactaaaaataaacattgattaaattttaatataatacttaaaaatggatgttgtgtcgttagataaaccgtttatgtattttgaggaaattgataatgagttagattacgaaccagaaagtgcaaatgaggtcgcaaaaaaactgccgtatcaaggacagttaaaactattactaggagaattattttttcttagtaagttacagcgacacggtatattagatggtgccaccgtagtgtatataggatctgctcccggtacacatatacgttatttgagagatcatttctataatttaggagtgatcatcaaatggatgctaattgacggccgccatcatgatcctattttaaatggattgcgtgatgtgactctagtgactcggttcgttgatgaggaatatctacgatccatcaaaaaacaactgcatccttctaagattattttaatttctgatgtgagatccaaacgaggaggaaatgaacctagtacggcggatttactaagtaattacgctctacaaaatgtcatgattagtattttaaaccccgtggcgtctagtcttaaatggagatgcccgtttccagatcaatggatcaaggacttttatatcccacacggtaataaaatgttacaaccttttgctccttcatattcagctgaaatgagattattaagtatttataccggtgagaacatgagactgactcgagttaccaaattagacgctgtaaattatgaaaaaaagatgtactaccttaataagatcgtccgtaacaaagtagttgttaactttgattatcctaatcaggaatatgactattttcacatgtactttatgctgaggaccgtgtactgcaataaaacatttcctactactaaagcaaaggtactatttctacaacaatctatatttcgtttcttaaatattccaacaacatcaactgaaaaagttagtcatgaaccaatacaacgtaaaatatctagcaaaaattctatgtctaaaaacagaaatagcaagagatccgtacgcggtaataaatagaaacgtactactgagatatactaccgatatagagtataatgatttagttactttaataaccgttagacataaaattgattctatgaaaactgtgtttcaggtatttaacgaatcatccataaattatactccggttgatgatgattatggagaaccaatcattataacatcgtatcttcaaaaaggtcataacaagtttcctgtaaattttctatacatagatgtggtaatatctgacttatttcctagctttgttagactagatactacagaaactaatatagttaatagtgtactacaaacaggcgatggtaaaaagactcttcgtcttcccaaaatgttagagacggaaatagttgtcaagattctctatcgccctaatataccattaaaaattgttagatttttccgcaataacatggtaactggagtagagatagccgatagatctgttatttcagtcgctgattaatcaattagtagagatgagataagaacattataataatcaataatatatcttatatcttatatcttatatcttatatcttgtttagaaaaatgctaatattaaaatagctaacgctagtaatccaatcggaagccatttgatatctataatagggtatctaatttcctgatttaaatagcggacagctatattctcggtagctactcgtttggaatcacaaacattatttacatctaatttactatctgtaatggaaacgtttcccaatgaaatggtacaatccgatacattgcattttgttatatttttttttaaagaggctggtaacaacgcatcgcttcgtttacatggctcgtaccaacaataatagggtaatcttgtatctattcctatccgtactatgcttttatcaggataaatacatttacatcgtatatcgtctttgttagcatcacagaatgcataaatttgttcgtccgtcatgataaaaatttaaagtgtaaatataactattatttttatagttgtaataaaaagggaaatttgattgtatactttcggttctttaaaagaaactgacttgataaaaatggctgtaatctctaaggttacgtatagtctatatgatcaaaaagagattaatgctacagatattatcattagtcatgttaaaaatgacgacgatatcggtaccgttaaagatggtagactaggtgctatggatggggcattatgtaagacttgtgggaaaacggaattggaatgtttcggtcactggggtaaagtaagtatttataaaactcatatagttaagcctgaatttatttcagaaattattcgtttactgaatcatatatgtattcactgcggattattgcgttcacgagaaccgtattccgacgatattaacctaaaagagttatcgggacacgctcttaggagattaaaggataaaatattatccaagaaaaagtcatgttggaacagtgaatgtatgcaaccgtatcaaaaaattactttttcaaagaaaaaggtttgtttcgtcaacaagttggatgatattaacgttcctaattctctcatctatcaaaagttaatttctattcatgaaaagttttggccattattagaaattcatcaatatccagctaacttattttatacagactactttcccatccctccgttgattattagaccggctattagtttttggatagatagtatacccaaagagaccaatgaattaacttacttattaggtatgatcgttaagaattgtaacttgaatgctgatgaacaggttatccagaaggcggtaatagaatacgatgatattaaaattatttctaataacactaccagtatcaatttatcatatattacatccggcaaaaataatatgattagaagttatatcgtcgcccgacgaaaagatcagaccgctagatctgtaattggtcccagtacatctatcaccgttaatgaggtaggaatgcccgcatatattagaaatacacttacagaaaagatatttgttaatgcctttacagtggataaagttaaacaactattagcgtcaaaccaagttaaattttactttaataaacgattaaaccaattaacaagaatacgccaaggaaagtttattaaaaataaaatacatttattgcctggtgattgggtagaagtagctgttcaagaatatacaagtattatttttggaagacagccgtctctacatagatacaacgtcatcgcttcatctatcagagctaccgaaggagatactatcaaaatatctcccggaattgccaactctcaaaatgctgatttcgacggggatgaggaatggatgatattagaacaaaatcctaaagctgtaattgaacaaagtattcttatgtatccgacgacgttactcaaacacgatattcatggagcccccgtttatggatctattcaagatgaaatcgtagcagcgtattcattgtttaggatacaagatctttgtttagatgaagtattgaacatcttggggaaatatggaagagagttcgatcctaaaggtaaatgtaaattcagcggtaaagatatctatacttacttgataggtgaaaagattaattatccgggtctcttaaaggatggtgaaattattgcaaacgacgtagatagtaattttgttgtggctatgaggcatctgtcattggctggactcttatccgatcataagtcgaacgtggaaggtatcaactttattatcaagtcatcttatgtttttaagagatatctatctatttacggttttggggtgacattcaaagatctgagaccaaattcgacgttcactaataaattggaggccatcaacgtagaaaaaatagaacttatcaaagaagcatacgccaaatatctcaacgatgtaagagacgggaaaatagttccattatctaaagctttagaggcggactatgtggaatccatgttatccaacttgacaaatcttaatatccgagagatagaagaacatatgagacaaacgctgatagatgatccagataataacctcctgaaaatggccaaagcgggttataaagtaaatcccacagaactaatgtatattctaggtacgtatggacaacaaaggattgatggtgaaccagcagagactcgagtattgggtagagttttaccttactatcttccagactctaaggatccagaaggaagaggttacattcttaattctttaacaaaaggattaacgggttctcaatattacttttcgatgctggttgccagatctcaatctactgatatcgtctgtgaaacatcacgtaccggaacactggctagaaaaatcattaaaaagatggaggatatggtggtcgacggatacggacaagtagttataggtaatacgctcatcaagtacgccgccaattataccaaaattctaggctcagtatgtaaacctgtagatcttatctatccagatgagtccatgacttggtatttggaaattagtgctctgtggaataaaataaaacagggattcgtttactctcagaaacagaaacttgcaaagaagacattggcgccgtttaatttcctagtattcgtcaaacccaccactgaggataatgctattaaggttaaggatctgtacgatatgattcataacgtcattgatgatgtgagagagaaatacttctttacggtatctaatatagattttatggagtatatattcttgacgcatcttaatccttctagaattagaattacaaaagaaacggctatcactatctttgaaaagttctatgaaaaactcaattatactctaggtggtggaactcctattggaattatttctgcacaggtattgtctgagaagtttacacaacaagccctgtccagttttcacactactgaaaaaagtggtgccgtcaaacaaaaacttggtttcaacgagtttaataacttgactaatttgagtaagaataagaccgaaattatcactctggtatccgatgatatctctaaacttcaatctgttaagattaatttcgaatttgtatgtttgggagaattaaatccaaacatcactcttcgaaaagaaacagataaatatgtagtagatataatagtcaatagattatacatcaagagagcagaaataaccgaattagtcgtcgaatatatgattgaacgatttatctcctttagcgtcattgtaaaggaatggggtatggagacattcattgaggacgaggataatattagatttactgtctacctaaatttcgttgaaccggaagaattgaatcttagtaagtttatgatggttcttccgggggcagccaacaagggaaagattagtaaattcaagattcctatctctgattatacgggatatgacgacttcaatcaaacaaaaaagctcaataagatgactgtagaactcatgaatctaaaagaattgggttctttcgatttggaaaacgtcaacgtgtatcctggagtatggaatacatacgatatcttcggtatcgaggccgctcgtgaatacttgtgcgaagccatgttaaacacctatggagaagggttcgattatctgtatcagccttgtgatcttctcgctagtttactatgtgctagttacgaaccagaatcagtgaataaattcaagttcggcgcagctagtactcttaagagagctacgttcggagacaataaagcattgttaaacgcggctcttcataaaaagtcagaacctattaacgataatagtagctgccacttttttagcaaggtccctaatataggaactggatattacaaatactttatcgacttgggtcttctcatgagaatggaaaggaaactatctgataagatatcttctcaaaagatcaaggaaatggaagaaacagaagacttttaattcttatcaataacatatttttctatgatctgtcttttaaacgatggattttccacaaatgcgcctctcaagtccctcatagaatgatacacgtataaaaaatatagcataggcaatgactccttatttttagacattagatatgccaaaatcatagccccgcttctatttactcccgcagcacaatgaaccaacacgggctcgtttcgttgatcacatttagataaaaaggcggttacgtcgtcaaaatatttactaatatcggtagttgtatcatctaccaacggtatatgaataatattaatattagagttaggtaatgtatatttatccatcgtcaaatttaaaacatatttgaacttaacttcagatgatggtgcatccatagcatttttataatttcccaaatacacattattggttacccttgtcattatagtgggagatttggctttgtgcatatctccagttgaacgtagtagtaagtatttatacaaacttttcttatccatttataacgtacaaatggataaaactactttatcggtaaacgcgtgtaatttagaatacgttagagaaaaggctatagtaggcgtacaagcagccaaaacatcaacacttatattctttgttattatattggcaattagtgcgctattactctggtttcagacgtctgataatccagtctttaatgaattaacgagatatatgcgaattaaaaatacggttaacgattggaaatcattaacggatagcaaaacaaaattagaaagtgatagaggtagacttctagccgctggtaaggatgatatatttgaattcaaatgtgtggatttcggcgcctattttatagctatgcgattggataagaaaacatatctgccgcaagctattaggcgaggtactggagacgcgtggatggttaaaaaggcggcaaaggtcgatccatctgctcaacaattttgtcagtatttgataaaacacaagtctaataatgttattacttgtggtaatgagatgttaaatgaattaggttatagcggttattttatgtcaccgcattggtgttccgattttagtaatatggaatagtgttagataaatgcggtaacgaatgttcctgtaaggaaccataacagcttagatttaacgttaaagatgagcataaacataataaacaaaattacaatcaaacttataacattaatatcaaacaatccaaaaaatgaaatcagtggagtagtaaacgcgtacataactcctggataacgtttagcagctgccgttcctattctagaccaaaaattcggtttcatgttttcgaaacggtattctgcaacaagtcgaggatcgtgttctacatatttggcggcattatccagtatctgcctattgatcttcatttcgttttcgattctggctatttcaaaataaaatcccgatgatagacctccagactttataatttcatctacgatgttcagcgccgtagtaactctaataatataggctgataagctaacatcataccctcctgtatatgtgaatatggcatgatttttgtccattacaagctcggttttaactttattgcctgtaataatttctctcatctgtaggatatctatttttttgtcatgcattgccttcaagacgggacgaagaaacgtaatatcctcaataacgttatcgttttctacaataactacatattctacctttttattttctaactcggtaaaaaaattagaatcccatagggctaaatgtctagcgatatttcttttcgtttcctctgtacacatagtgttacaaaaccctgaaaagaagtgagtatacttgtcatcatttctaatgtttcctccagtccactgtataaacgcataatccttgtaatgatctggatcatccttgactaccacaacatttcttttttctggcataacttcgttgtcctttacatcatcgaacttctgatcattaatatgctcatgaacattaggaaatgtttctgatggaggtctatcaataactggcacaacaataacaggagttttcaccgccgccatttagttattgaaattaatcatatacaactctttaatacgagttatattttcgtctatccattgtttcacattgacatatttcgacaaaaagatataaaatgcgtattccaatgcttctctgtttaatgaattactaaaatatacaaacacgtcactgtctggcaataaatgatatcttagaatattgtaacaatttattttgtattgcacatgttcgtgatctatgagttcttcttcgaatggcataggatctccgaatctgaaaacgtataaataggagttagaataataatatttgagagtattggtaatatataaactctttagcggtataattagtttttttctctcaatttctatttttagatgtgatggaaaaatgactaattttgtagcattagtatcatgaactctaatcaaaatcttaatatcttcgtcacacgttagctctttgaagtttttaagagatgcatcagttggttctacagatggagtaggtgcaacaattttttgttctacacatgtatgtactggagccattgttttaactataatggtgcttgtatcgaaaaactttaatgcagatagcggaagctcttcgccgcgactttctacgtcgtaattgggttctaacgccgatctctgaatggatactagttttctaagttctaatgtgattctctgaaaatgtaaatccaattcctccggcattatagatgtgtatacatcggtaaataaaactatagtatccaacgatcccttctcgcaaattctagtcttaaccaaaaaatcgtatataaccacggagatggcgtatttaagagtggattcttctaccgttttgttcttggatgtcatataggaaactataaagtccgcactactgttaagaatgattactaacgcaactatatagtttaaattaagcattttggaaacataaaataactctgtagacgatacttgactttcgaataagtttgcagacaaacgaagaaagaacagacctctcttaatttcagaagaaaactttttttcgtattcctgacgtctagagtttatatcaataagaaagttaagaattagtcggttaatgttgtatttcattacccaagtttgagatttcataatattatcaaaagacatgataatattaaagataaagcgctgactatgaacgaaatagctatatggttcgctcaagaatatagtcttgttaaacgtggaaacgataactgtatttttaatcacgtcagcggcatctaaattaaatataggtatatttattccacacactctacaatatgccacaccatcttcataataaataaattcgttagcaaaattattaattttagtgaaatagttagcgtcaactttcatagcttccttcaatctaatttgatgctcacacggtgcgaattccactctaacatcccttttccatgcctcaggttcatcgatctctataatatctagttttttgcgtttcacaaacacaggctcgtctctcgcgatgagatctgtatagtaactatgtaaatgataactagatagaaagatgtagctatatagatgacgatcctttaagagaggtataataactttaccccaatcagatagactgttgttatggtcttcggaaaaagaatttttataaatttttccagtattttccaaatatacgtacttaacatctaaaaaatccttaatgataataggaatggataatccgtctattttataaagaaatacatatcgcacattatacttttttttggaaatgggaataccgatgtgtctacataaatatgcaaagtctaaatattttttagagaatcttagttggtccaaattcttttccaagtacggtaatagatttttcatattgaacggtatcttcttaatctctggttctagttccgcattaaatgatgaaactaagtcactatttttataactaacgattacatcacctctaacatcatcatttaccagaatactgatcttcttttgtcgtaaatacatgtctaatgtgttaaaaaaaagatcatacaagttatacgtcatttcatctgtggtattcttgtcattgaaggataaactcgtactaatctcttctttaacagcctgttcaaatttatatcctatatacgaaaaaatagcaaccagtgtttgatcatccgcgtcaatattctgttctatcgtagtgtataacaatcgtatatcttcttctgtgatagtcgatacgttataaaggttgataacgaaaatatttttatttcgtgaaataaagtcatcgtaggattttggacttatattcgcgtctagtagatatgcttttatttttggaatgatctcaattagaatagtctctttagagtccatttaaagttacaaacaactaggaaattggtttatgatgtataatttttttagtttttatagattctttattctatacttaaaaaatgaaaataaatacaaaggttcttgagggttgtgttaaattgaaagcgagaaataatcataaattatttcattatcgcgatatccgttaagtttgtatcgtaatggcgtggtcaattacgaataaagcggatactagtagcttcacaaagatggctgaaatcagagctcatctaaaaaatagcgctgaaaataaagataaaaacgaggatattttcccggaagatgtaataattccatctactaagcccaaaaccaaacgagccactactcctcgtaaaccagcggctactaaaagatcaaccaaaaaggaggaagtggaagaagaagtagttatagaggaatatcatcaaacaactgaaaaaaattctccatctcctggagtcagcgacattgtagaaagcgtggccgctgtagagctcgatgatagcgacggggatgatgaacctatggtacaagttgaagctggtaaagtaaatcatagtgctagaagcgatctctctgacctaaaggtggctaccgacaatatcgttaaagatcttaagaaaattattactagaatctctgcagtatcgacggttctagaggatgttcaagcagctggtatctctagacaatttacttctatgactaaagctattacaacactatctgatctagtcaccgagggaaaatctaaagttgttcgtaaaaaagttaaaacttgtaagaagtaaatgcgtgcacttttttataaagatggtaaactctttaccgataataattttttaaatcctgtatcagacgataatccagcgtatgaggttttgcaacatgttaaaattcctactcatttaacagatgtagtagtatatgaacaaacgtgggaggaggcgttaactagattaatttttgtgggaagtgattcaaaaggacgtagacaatacttttacggaaaaatgcatgtacagaatcgcaacgctaaaagagatcgtatttttgttagagtatataacgttatgaaacgaattaattgttttataaacaaaaatataaagaaatcgtccacagattccaattatcagttggcggtttttatgttaatggaaactatgttttttattagatttggtaaaatgaaatatcttaaggagaatgaaacagtagggttattaacactaaaaaataaacacatagaaataagtcccgatgaaatagttatcaagtttgtaggaaaggacaaagtttcacatgaatttgttgttcataagtctaatagactatataaaccgctattgaaactgacggatgattctagtcccgaagaatttctgttcaacaaactaagtgaacgaaaggtatacgaatgtatcaaacagtttggtattagaatcaaggatctccgaacgtatggagtcaattatacgtttttatataatttttggacaaatgtaaagtccatatctcctcttccgtcaccaaaaaagttaatagcattaactatcaaacaaactgctgaagtggtaggtcatactccatcaatttcaaaaagagcttatatggcaacgactattttagaaatggtaaaggataaaaattttttagatgtagtatctaaaactacgttcgatgaattcctatctatagtcgtagatcacgttaaatcatctacggatggatgatatagatctttacacaaataattacaagaccgataaatggaaatggataagcgtatgaaatctctcgcaatgacagctttcttcggagagctaagcacattagatattatggcattgataatgtctatatttaaacgccatccaaacaataccattttttcagtggataaggatggtcagtttatgattgatttcgaatacgataattataaggcttctcaatatttggatctgaccctcactccgatatctggagatgaatgcaagactcacgcatcgagtatagccgaacaattggcgtgtgcggatattattaaagaggatattagcgaatatatcaaaactactccccgtcttaaacgatttataaaaaaataccgcaatagatcagatactcgtatcagtcgagatacagaaaagcttaaaatagctctagctaaaggcatagattacgaatatataaaagacgcttgttaataagtaaatgaaaaaaaactagtcgtttataataaaacacgatatggatgccaacgtagtatcattttctactattgcgacgtatatagacgctttagcgaagaatgcttcggaattagaacagaggtctaccgcatacgaaataaataatgaattggaactagtatttattaagccgccattgattactttgacaaatgtagtgaatatctctacgattcaggaatcgtttattcgatttaccgttactaataaggaaggtgttaaaattagaactaagattccattatctaaggtacatggtctagatgtaaaaaatgtacagttagtagatgctatagataacatagtttgggaaaagaaatcattagtgacggaaaatcgtcttcacaaagaatgcttgttgagactatcgacagaggaacgtcatatatttttggattacaagaaatatggatcctctatccgactagaattagtcaatcttattcaagcaaaaacaaaaaactttacgatagactttaagctaaaatattttctaggatccggtgcccagtctaaaagttctttgttgcacgctattaatcatccaaagtcaaggcctaatacatctctggaaatagaattcacacctagagacaatgaaacagttccatatgatgaactaataaaggaattgacgactctctcgcgtcatatatttatggcttctccagagaatgtaattctttctccgcctattaacgcgcctataaaaacctttatgttgcctaaacaagatatagtaggtttggatctggaaaatctatatgccgtaactaagactgacggcattcctataactatcagagttacatcaaacgggttgtattgttattttacacatcttggttatattattagatatcctgttaagagaataatagattccgaagtagtagtctttggtgaggcagttaaggataagaactggaccgtatatctcattaagctaatagagcctgtgaatgcaatcaatgatagactagaagaaagtaagtatgttgaatctaaactagtggatatttgtgatcggatagtattcaagtcaaagaaatacgaaggtccgtttactacaactagtgaagtcgtcgatatgttatctacatatttaccaaagcaaccagaaggtgttattctgttctattcaaagggacctaaatctaacattgattttaaaattaaaaaggaaaatactatagaccaaactgcaaatgtagtatttaggtacatgtccagtgaaccaattatctttggagaatcgtctatctttgtagagtataagaaatttagcaacgataaaggctttcctaaagaatatggttctggtaagattgtgttatataacggcgttaattatctaaataatatctattgtttggaatatattaatacacataatgaagtgggtattaagtccgtggttgtacctattaagtttatagcagaattcttagttaatggagaaatacttaaacctagaattgataaaaccatgaaatatattaactcagaagattattatggaaatcaacataatatcatagtcgaacatttaagagatcaaagcatcaaaataggagatatctttaacgaggataaactatcggatgtgggacatcaatacgccaataatgataaatttagattaaatccagaagttagttattttacgaataaacgaactagaggaccgttgggaattttatcaaactacgtcaagactcttcttatttctatgtattgttccaaaacatttttagacgattccaacaaacgaaaggtattggcgattgattttggaaacggtgctgacctggaaaaatacttttatggagagattgcgttattggtagcgacggatccggatgctgatgctatagctagaggaaatgaaagatacaacaaattaaactctggaattaaaaccaagtactacaaatttgactacattcaggaaactattcgatccgatacatttgtctctagtgtcagagaagtattctattttggaaagtttaatatcatcgactggcagtttgctatccattattcttttcatccgagacattatgctaccgtcatgaataacttatccgaactaactgcttctggaggcaaggtattaatcactaccatggacggagacaaattatcaaaattaacagataaaaagacttttataattcataagaatttacctagtagcgaaaactatatgtctgtagaaaaaatagctgatgatagaatagtggtatataatccatcaacaatgtctactccaatgactgaatacattatcaaaaagaacgatatagtcagagtgtttaacgaatacggatttgttcttgtagataacgttgatttcgctacaattatagaacgaagtaaaaagtttattaatggcgcatctacaatggaagatagaccgtctacaaaaaactttttcgaactaaatagaggagccattaaatgtgaaggtttagatgtcgaagacttacttagttactatgttgtttatgtcttttctaagcggtaaataataatatggtatgggttctgatctcccagttctaaatgcattaaataattccaatagagcgatttttgttcctataggaccttccaactgtggatactctgtattgttaatagatatattaatacttttgtcgggtaacagaggttctacgtcttctaaaaataaaagttttataacatctggcctgttcataaataaaaacttggcgattctatatatactcttattatcaaatctagccattgtcttatagatgtgagctactgtaggtgtaccatttgattttctttctaatactatatatttctctcgaagaagttcttgcacatcatctgggaataaaatactactgttgagtaaatcagttattttttttatatcgatattgatggacatttttatagttaaggataataagtatcccaaagtcgataacgacgataacgaagtatttatacttttaggaaatcacaatgactttatcagattaaaattaacaaaattaaaggagcatgtatttttttctgaatatattgtgactccagatacatatggatctttatgcgtcgaattaaatgggtctagttttcagcacggcggtagatatatagaggtggaggaatttatagatgctggaagacaagttagatggtgttctacatccaatcatatatctaaagatatacccgaagatatgcacactgataaatttgtcatttatgatatttatacgtttgattcgttcaagaataaacgattggtattcgtacaggtacctccgtcgttaggagatgatagtcatttgactaatccgttattgtcaccgtattatcgtaattcagtagccagacaaatggtcaatgatatgatttttaatcaagattcatttttaaaatatttattagaacatctgattagaagccactatagagtttctaaacatataacaatagttagatacaaggataccgaagaattaaatctaacgagaatatgttataatagagataagtttaaggcgtttgtattcgcttggtttaacggcgtttcggaaaatgaaaaggtactagatacgtataaaaaggtatctaatttgatataatgaattcagtgactgtatcacacgcgccatatactattacttatcacgatgattgggaaccagtaatgagtcaattggtagagttttataacgaagtagccagttggctgctacgagacgagacgtcgcctattcctgataagttctttatacagttgaaacaaccgcttagaaataaacgagtatgtgtgtgtggtatagatccgtatccgaaagatggaactggtgtaccgttcgaatcaccaaattttacaaaaaaatcaattaaggagatagcttcatctatatctagattaaccggagtaattgattataaaggttataaccttaatataatagacggggttataccctggaattattacttaagttgtaaattaggagaaacaaaaagtcacgcgatttactgggataagatttccaagttactgctgcagcatataactaaacacgttagtgttctttattgtttgggtaaaacagatttctcgaatatacgggccaagttagaatccccggtaactaccatagtcggatatcatccagcggctagagaccgccaattcgagaaagatagatcatttgaaattatcaacgttttactggaattagacaacaaggcacctataaattgggctcaagggtttatttattaatgctttagtgaaattttaacttgtgttctaaatggatgcggctattagaggtaatgatgttatctttgttcttaagactataggtgtcccgtcagcgtgcagacaaaatgaagatccaagatttgtagaagcatttaaatgcgacgagttagaaagatatattgagaataatccagaatgtacactattcgaaagtcttagggatgaggaagcatactctatagtcagaattttcatggatgtagatttagacgcgtgtctagacgaaatagattatttaacggccattcaagattttattatcgaggtgtcaaactgtgtagctagattcgcgtttacagaatgcggcgccattcatgaaaatgtaataaaatccatgagatctaatttttcattgactaagtctacaaatagagataaaacaagttttcatattatctttttagatacgtataccactatggatacattgatagctatgaaacgaacactattagaattaagtagatcatctgaaaatccactaaccagatcgatagacactgccgtatataggagaaaaacaactcttcgggttgtaggtactaggaaaaatccaaattgcgacactattcatgtaatgcaaccaccgcatgataatatagaagattacctattcacttacgtggatatgaacaacaatagttattacttttctctacaacaacgattggaggatttagttcctgataagttatgggaaccagggtttatttcattcgaagacgctataaaaagagtttcaaaaatattcattaattctataataaactttaatgatctcgatgaaaataattttacaacggtaccactggtcatagattacgtaacaccttgtgcattatgtaaaaaacgatcgcataaacatccgcatcaactatcgttggaaaatggtgctattagaatttacaaaactggtaatccacatagttgtaaagttaaaattgttccgttggatggtaataaactgtttaatattgcacaaagaattttagacactaactctgttttattaaccgaacgaggagaccatatagtttggattaataattcatggaaatttaacagcgaagaacccttgataacaaaactaattttgtcaataagacatcaactacctaaggaatattcaagcgaattactctgtccaagaaaacgaaagactgtagaagctaacatacgagacatgttagtagattcagtggagaccgatacctatccggataaacttccgtttaaaaatggtgtattggacctggtagacggaatgttttactctggagatgatgctaaaaaatatacgtgtactgtatcaaccggatttaaatttgacgatacaaagttcgtcgaagacagtccagaaatggaagagttaatgaatatcattaacgatatccaaccattaacggatgaaaataagaaaaatagagagctatatgaaaaaacattatctagttgtttatgcggtgctaccaaaggatgtttaacattcttttttggagaaactgcaactggaaagtcgacaaccaaacgtttgttaaagtctgctatcggtgacctgtttgttgagacgggtcaaacaattttaacagatgtattggataaaggacctaatccatttatcgctaacatgcatttgaaaagatctgtattctgtagcgaactacctgattttgcctgtagtggatcaaagaaaattagatctgacaatattaaaaagttgacagaaccttgtgtcattggaagaccgtgtttctccaataaaattaataatagaaaccatgcgacaatcattatcgatactaattacaaacctgtttttgataggatagataacgcattaatgagaagaattgccgtcgtgcgattcagaacacacttttctcaaccttctggtagagaggctgctgaaaataatgacgcgtacgataaagtcaaactattagacgaggggttagatggtaaaatacaaaataatatatatagatttgcatttctatacttgttggtgaaatggtacaaaaaatatcatgttcctattatgaaactatatcctacacccgaagagattcctgactttgcattctatctcaaaataggtactctgttggtatctagctctgtaaagcatattccattaatgacggacctctccaaaaagggatatatattgtacgataatgtggtcactcttccgttgactactttccaacagaaaatatccaagtattttaattctagactatttggacacgatatagagagcttcatcaatagacataagaaatttgccaatgttagtgatgaatatctgcaatatatattcatagaggatatttcatctccgtaaatatatgctcatatatttatagaagatatcacatatctaaatgaataccggaatcatagatttatttgataatcatgttgatagtataccaactatattacctcatcagttagctactctagattatctagttagaactatcatagatgagaacagaagcgtgttattgttccatattatgggatcaggtaaaacaataatcgctttgttgttcgccttggtagcttccagatttaaaaaggtttacattctagtgccgaacatcaacatcttaaaaattttcaattataatatgggtgtagctatgaacttgtttaatgacgaattcatagctgagaatatctttattcattccacaacaagtttttattctcttaattataacgataacgtcattaattataacggattatctcgctacaataactctatttttatcgttgatgaggcacataatatctttgggaataatactggagaacttatgaccgtgataaaaaataaaaacaagattccttttttactattgtctggatctcccattactaacacacctaatactctgggtcatattatagatttaatgtccgaagagacgatagattttggtgaaattattagtcgtggtaagaaagtaattcagacacttcttaacgaacgcggtgtgaatgtacttaaggatttgcttaaaggaagaatatcatattacgaaatgcctgataaagatctaccaacgataagatatcacggacgtaagtttctagatactagagtagtatattgtcacatgtctaaacttcaagagagagattatatgattactagacgacagctatgttatcatgaaatgtttgataaaaatatgtataacgtgtcaatggcagtattgggacaacttaatctgatgaataatttagatactttatttcaggaacaggataaggaattgtacccaaatctgaaaataaataatggcgtgttatacggagaagaattggtaacgttaaacattagttccaaatttaaatactttattaatcggatacagacactcaacggaaaacattttatatacttttctaattctacatatggcggattggtaattaaatatatcatgctcagtaatggatattctgaatataatggttctcagggaactaatccacatatgataaacggcaaaccaaaaacatttgctatcgttactagtaaaatgaaatcgtctttagaggatctattagatgtgtataattctcctgaaaacgatgatggtagtcaattgatgtttttgttttcatcaaacattatgtccgaatcctatactctaaaagaggtaaggcatatttggtttatgactatcccagatactttttctcaatacaaccaaattcttggacgatctattagaaaattctcttacgccgatatttctgaaccagttaatgtatatcttttagccgccgtatattccgatttcaatgacgaagtgacgtcattaaacgattacacacaggatgaattaattaatgttttaccatttgacatcaaaaagctgttgtatctaaaatttaagacgaaagaaacgaatagaatatactctattcttcaagagatgtctgaaacgtattctcttccaccacatccatcaattgtaaaagttttattgggagaattggtcagacaatttttttataataattctcgtattaagtataacgataccaagttacttaaaatggttacatcagttataaaaaataaagaagacgctaggaattacatagatgatattgtaaacggtcacttctttgtatcgaataaagtatttgataaatctcttttatacaaatacgaaaacgatattattacagtaccgtttagactttcctacgaaccatttgtttggggagttaactttcgtaaagaatataacgtggtatcttctccataaaactgatgagatatataaagaaataaatgtcgagctttgttaccaatggatacctttccgttacattggaaccacacgagctgacgttagacataaaaactaatattaggaatgccgtatataagacgtatctccatagagaaattagtggtaaaatggccaagaaaatagaaattcgtgaagacgtggaattacctctcggcgaaatagttaataattctgtagttataaacgttccgtgtgtaataacctacgcgtattatcacgttggggatatagtcagaggaacattaaacatcgaagatgaatcaaatgtaactattcaatgtggagatttaatctgtaaactaagtagagattcgggtactgtatcatttagcgattcaaagtactgcttttttcgaaatggtaatgcgtatgacaatggcagcgaagtcactgccgttctaatggaggctcaacaaggtatcgaatctagttttgtttttctcgcgaatatcgtcgactcataaaaaagagaatagcggtaagtataaacacgaatactatggcaataattgcgaatgttttattctcttcgatatatttttgataatatgaaaaacatgtctctctcaaatcggacaaccatctcataaaatagttctcgcgcgctggagaggtagttgccgctcgtataatctctccagaataatatacttgcgtgtcgtcgttcaatttatacggatttctatagttctctgttatataatgcggtttgccctcatgattagacgacgacaatagtgttctaaatttagatagttgatcagaatgaatgtttattggcgttggaaaaattatccatacagcgtctgcagagtggttgatagttgttcctagatatgtaaaataatccaacttactaggcagcaaattgtctagataaaatactgaatcaaacggtgcagacgtattggcggatctaatggaatccaattgattaactatcttttgaaaatatacatttttatgatccaatacttgtaagaatatagaaataatgataagtccatcatcgtgtttttttgcctcttcataagaactatattttttcttattccaatgaacaagattaatctctccagagtatttgtacacatctatcaagtgattggatccataatcgtcttcctttccccaatatatatgtagtgatgataacacatattcattggggagaaaccctccacttatatatcctcctttaaaattaatccttactagttttccagtgttctggatagtggttggtttcgactcattataatgtatgtctaacggcttcaatcgcgcgttagaaattgcttttttagtttctatattaataggagatagttgttgcggcatagtaaaaatgaaatgataactgtttaaaaatagctcttagtatgggaattacaatggatgaggaagtgatatttgaaactcctagagaattaatatctattaaacgaataaaagatattccaagatcaaaagacacgcatgtgtttgctgcgtgtataacaagtgacggatatccgttaataggagctagaagaacttcattcgcgttccaggcgatattatctcaacaaaattcagattctatctttagagtatccactaaactattacggtttatgtactacaatgaactaagagaaatctttagacggttgagaaaaggttctatcaacaatatcgatcctcactttgaagagttaatattattgggtggtaaactagataaaaaggaatctattaaagattgtttaagaagagaattaaaagaggaaagtgatgaacgtataacagtaaaagaatttggaaatgtaattctaaaacttacaacacgggataaattatttaataaagtatatataagttattgcatggcgtgttttattaatcaatcgttggaggatttatcgcatactagtatttacaatgtagaaattagaaagattaaatcattaaatgattgtattaacgacgataaatacgaatatctgtcttatatttataatatgctagttaatagtaaatgaacttttacagatctagtataattagtcagattattaagtataatagacgactagctaagtctattatttgcgaggatgactctcaaattattacactcacggcattcgttaaccaatgcctatggtgtcataaacgagtatccgtgtccgctattttattaactactgataacaaaatattagtatgtaacagacgagatagttttctctattctgaaataattagaactagaaacatgtttagaaagaaacgattatttctgaattattccaattatttgaacaaacaggaaagaagtatactatcgtcatttttttctctagatccagctactactgataatgatagaatagacgctatttatccgggtggcatacccaaaaggggtgagaatgttccagagtgtttatccagggaaattaaagaagaagttaatatagacaattcttttgtattcatagacactcggttttttattcatggcatcatagaagataccattattaataaattttttgaggtaatcttctttgtcggaagaatatctctaacgagtgatcaaatcattgatacatttaaaagtaatcatgaaatcaaggatctaatatttttagatccgaattcaggtaatggactccaatacgaaattgcaaaatatgctctagatactgcaaaacttaaatgttacggccatagaggatgttattatgaatcattaaaaaaattaactgaggatgattgattaaaaaatataaattaatttaccatcgtgtatttttataacgggattgtccggcatatcatgtagatagttaccgtctacatcgtatactcgaccatctacgcctttaaatcctctatttattgacattaatctattagaattggaataccaaatattagtaccctcaattagtttattggtaatattttttttagacgatagatcgatggctcttgaaaccaaggttttccaaccggactcattgtcgatcggtgagaagtctttttcattagcatgaatccattctaatgatgtatgtttaaacactctaaacaattggacaaattcttttgatttgctttgaatgatttcaaataggtcttcgtctacagtaggcataccattagataatctagccattataaagtgcacgtttacatatctacgttctggaggagtaagaacgtgactattgagacgaatggctcttcctactatctgacgaagagacgcctcgttccatgtcatatctaaaatgaagatatcattaattgagaaaaaactaataccctcgcctccactagaagagaatacgcatgttttaatgcattctccgttagtgtttgattcttggttaaactcagccaccgccttgattctagtatcttttgttctagatgagaactctatattagagataccaaagactttgaaatatagtaataagatttctattcctgactgattaacaaatggttcaaagactagacatttaccatgggatgctaatattcccaaacatacatctataaatttgacgcttttctcttttaattcagtaaatagagagatatcagccgcactagcatcccctttcaatagttctccctttttaaaggtatctaatgcggatttagaaaactctctatctcttaatgaatttttaaaatcattatatagtgttgctatctcttgcgcgtattcgcccggatcacgattttgtctttcaggaaagctatcgaacgtaaacgtagtagccatacgtctcagaattctaaatgatgatatacctgtttttatttcagcgagtttagccttttgataaatttcttcttgctttttcgacatattaacgtatcgcattaatactgttttcttagcgaatgatgcagacccttctacgtcatcaaaaatagaaaactcgttattaactatatacgaacatagtcctcctagtttggagactaattctttttcatcgactagacgtttattctcaaatagcgattggtgttgtaaggatcctggtcgtagtaagttaaccaacatggtgaattcttgcacactattgacgataggtgtagccgataaacaaatcatcttatggttttttaacgcaatggtcttagataaaaaattatatactgaacgagtaggacggatcttaccatcttctttgattaatgatttagaaatgaagttatgacattcatcaataatgacgcatattctactcttggaattaatagttttgatattagtaaaaaatttatttctaaaattttgatcatcgtaattaataaaaatacaatccttcgttatctctggagcgtatctgagtatagtgttcatccaaggatcttctatcaaagcctttttcaccaataagataatagcccaattcgtataaatatccttaagatgtttgagaatatatacagtagtcattgttttaccgacacccgtttcatggaacaataaaagagaatgcatactgtctaatcctaagaaaactcttgctacaaaatgttgataatccttgaggcgtactacgtccgaccccatcatttcaacgggcatattagtagttctgcgtaaggcataatcgatataggccgcgtgtgatttactcatttatgagtgataagtaataactatgttttaaaaatcacagcagtagtttaactagtcttctctgatgtttgttttcgatactttttgaatcagaagtcatactagaataaagcaacgagtgaacgtaatagagagcttcgtatactctattcgaaaactctaagaacttattaatgaattccgtatccactggattgtttaaaatactaaattgaacactgttcacatccttccaagaagaagacttagtgacggacttaacatgagacataaataaatccaaattttttttacaaacatcactagccaccataatggcgctatctttcaaccagctatcgcttacgcattttagcagtctaacatttttaaagagactacaatatattctcatagtatcgattacacctctaccgaataaagttggaagtttaataatacaatatttttcgtttacaaaatcaaataatggtcgaaacacgtcgaaggttaacatcttataatcgctaatgtatagattgttttcagtgagatgattattagatttaatagcatctcgttcacgtttgaacagtttattgcgtgcgctgaggtcggcaactacggcgtccgctttagtactcctcccataatactttacgctattaatctttaaaatttcatagactttatctagatcgctttctggtaacatgatatcatgtgtaaaaagttttaacatgtcggtcggcattctatttagatcattaactctagaaatctgaagaaagtaattagctccgtattccagactaggtaatgggcttttacctagagacagattaagttctggcaatgtttcataaaatggaagaaggacatgcgttccctcccggatattttttacaatttcatccatttacaactctatagtttgttttcattattattagttattatctcccataatcttggtaatacttaccccttgatcgtaagataccttatacaggtcattacatacaactaccaattgtttttgtacataatagattggatggttgacatccatggtggaataaactactcgaacagatagtttatctttccccctagatacattagccgtaatagttgtcggcctaaagaatatctttggtgtaaagttaaaagttagggttcttgttccattattgctttttgtcagtagttcattataaattctcgagatgggtccgttctctgaatatagaacatcatttccaaatctaacttctagtctagaaataatatcggtcttattcttaaaatctattcccttgatgaagggatcgttaatgaacaaatccttggcctttgattcggctgatctattatctccgttatagacgttacgttgactagtccaaagacttacaggaatagatgtatcgatgatgttgatactatgtgatatgtgagcaaagattgttctcttagtggcatcactatatgttccagtaatggcggaaaactttttagaaatgttatatataaaagaattttttcgtgttccaaacattagcagattagtatgaagataaacactcatattatcaggaacattatcaatttttacatacacatcagcatcttgaatagaaacgataccatcttctggaacctctacgatctcggcagactccggataaccagtcggtgggccatcgctaacaataactagatcatccaacaatctactcacatatgcatctatataatctttttcatcttgtgagtaccctggatacgaaataaatttattatccgtatttccataataaggtttagtataaacagagagagatgttgccgcatgaacttcagttacagtcgccgttggttggtttatttgacctattactctcctaggtttctctataaacgatggtttaatttgtacattcttaaccatatatccaataaagctcaattcaggaacataaacaaattctttgttgaacgtttcaaagtcgaacgaagagtcacgaataacgatatcggatactggattgaaggttaccgttacggtaatttttgaatcggatagtttaagactgctgaatgtatcttccacatcaaacggagttttaatataaacgtatactgtagatggttctttaatagtgtcattaggagttaggccaatagaaatatcattaagttcactagaatatccagagtgtttcaaagcaattgtattattgatacaattattatataattcttcgccctcaatttcccaaataacaccgttacacgaagagatagatacgtgattaatacatttatatccaacatatggtacgtaactgaatcttcccatacctttaacttctggaagttccaaactcagaaccaaatgattaagcgcagtaatatactgatccctaatttcgaagctagcgatagcctgattgtctggaccatcgtttgtcataactccggatagagaaatatattgcggcatatacaaagttggaatttgactatcgactgcgaagacattagaccgtttaatagagtcatccccaccgatcaaagaattaatgatagtattattcattttctatttaaaatggaaaaagcttacaataaactccgtagagaaatatctataatttgtgagttttccttaaagtaacagcttccgtaaacgccgtctttatctcttagtaggtttattgtatttatgaccttttccttatcttcatagaatactaaaggcaacaaagaaatttttggttcttctctaagagctacgtgagacttaaccatagaagccaacgaatccctacatattttagaacagaaataccctacttcaccacccttgtatgtctcaatactaataggtctaaaaaccaaatcttgattacaaaaccaacacttatcaattacactatttgtcttaatagacacatctgccatagatttataatactttggtagtatacaagcgagtgcttcttctttagcgggcttaaagactgctttaggtgctgaaataaccacatctggaaggcttactcgcttagccatttaattacggaactatttttttatacttctaatgagcaagtagaaaacctctcatctacaaaaacgtactcgtgtccataatcctctaccatagttacacgttttttagatctcatatgtgctaaaaagttttcccatactaattggttactattatttttcgtataatttttaacagtttgaggttttagatttttagttacagaagtgatatcgaatattttatccaaaaagaatgaataattaattgtcttagaaggagtgttttcttggcaaaagaataccaagtgcttaaatatttctactacttcattaatcttttctgtactcagattcagtttctcatcttttacttgattgattatttcaaagactaacttataatcctttttatttattctctcgttagccttaagaaaactagatacaaaatttgcatctacatcatccgtggatatttgatttttttccatgatatccaagagttccgagataatttctccagaacattgatgagacaataatctccgcaatacatttctcaaatgaataagtttattagacacgtggaagtttgactttttttgtacctttgtacatttttgaaataccgactcgcaaaaaatacaatattcatatccttgttcagatactataccgttatgtctacaaccgctacataatcgtagattcatgttaacactctacgtatctcgtcgtccaatattttatataaaaacattttatttctagacgttgccagaaaatcctgtaatatttttagttttttgggctgtgaataaagtatcgccctaatattgttaccgtcttccgccaatatagtagttaaattatccgcacatgcagaagaacaccgcttaggcggattcagtacaatgttatatttttcgtaccaactcatttaaatatcataatctaaaatagttctgtaatatgtctagcgctaatatattgatcataatcctgtgcataaattaagatacaacaatgtctcgaaatcatcgacatggcttcttccatagttagaagatcgtcgtcaaagttagcaacgtgattcatcaacatttgctgttttgaggcagcaaatactgaaccgtcgccattcaaccattcataaaaaccatcgtctgaatccattgataatttcttgtactggtttttgagagctcgcatcaatctagcatttctagctcccggattgaaaacagaaagaggatcgtacatccagggtccattttctgtaaatagaatcgtataatgtcccttcaagaagatatcagacgatccacaatcaaagaattggtctccgagtttgtaacaaactgcggactttaacctatacatgataccgtttagcataatttctggtgatacgtcaatcggagtatcatctattagagatctaaagccggtgtaacattctccaccaaacatattcttattctgacgtcgttctacataaaacatcattgctccattaacgataacaggggaatgaacagcactacccatcacattagttcccaatggatcaatgtgtgtaactccagaacatcttccatagcctatgttaggaggagcgaacaccactcttccactattgccatcgaatgccatagaataaatatccttggaattgatagaaatcggactgtcggatgttgtgatcatcttcataggattaacaactatgtatggtgccgcctgaagtttcatatcgtaactgatgccgtttataggtctagccacagaaaccaacgtaggtctaaatccaactatagacaaaatagaagccaatatctgttcctcatctgtcataacttgagagcatccagtatgaataatcttcattagatggggatctaccgcatcatcatcgttacaataaaaaattcccattctaatgttcataattgcttttctaatcatggtatgcatgtttgctctctgaatctctgtggaaattagatctgatacacctgtaatcactatcggattatcctccgtaagacgattaaccaacaacatataattataagactttacttttctaaattcataaagttgctggattaggctataggtgtctccatgtacatacgcgttctcgagcgcaggaagtttaataccgaatagtgccatcagaataggatgaatatagtaattagtttctggttttctataaataaaagacaaatcttgtgaactagacatatcggtaaaatgcatggattggaatcgtgtagtcgacagaagaatatgatgattagatggagagtatattttatctaactctttgagttggtcaccgattctaggactagctcgagaatgaataagtactaaaggatgagtacatttcacagaaacactagcattgttcaatgtgctctttacatgggtaaggagttgaaatagctcgtttctatttgttctgacaatatttagtttattcataatgttaagcatatcctgaatagtaaagttagatgtgtcatacttgttagtagttagatatttagcaattgcattcccatcatttctcaatctcgtactccaatcatgcgtggatgctacttcgtcgatggaaaccatacaatcctttttgataggctgttgagattgatcatttcctgcacgtttaggtttggtacgttgatttctagcccctgcggatataaagtcatcgtctacaatttgggacaatgaattgcatacactacaagacaaagatttatcagaagtgtgaatatgatcttcatctaccaaagaaagagtttgattagtataactagattttagtcctgcgttagatgttaaaaaaacatcgctattgaccacggcttccattatttatattcgtagtttttactcgaaagcgtgattttaatatccaatcttattacttttggaatcgttcaaaacctttgactagttgtagaatttgatctattgccctacgcgtatactcccttgcatcatatacgttcgtcaccagatcgtttgtttcggcctgaagttggtgcatatctctttcaacattcgacatgagatccttaagggccatatcgtctagattttgttgagatgctgctcctggatttggattttgttgtgctgttgtacatactgtaccaccagtaggtgtaggagtacatacagtggccacaataggaggttgagaaagtgtaaccgttggagtagtacaagaaatacttccatccgattgttgtgtacatgtagttgttggtaacgtctgagaaggttgggtagatggcggcgtcgtcgttttttgatctttattaaatttagagataatatcctgaacagcattgctcggcgtcaacgctggaaggagtgaactcgccggcgcatcagtatcttcagacagccaatcaaaaagattagacatatcagatgatgtattagtttgttgtcgtggttttggtgtaggagcagtactactaggtagaagaataggagccgatgtagctgttggaaccggctgtggagttatatgaatagttggttgtagcggttggataggctgtctgctggcggccatcatattatctctagctagttgttctcgcaactgtctttgataatacgactcttgagactttagtcctatttcaatcgcttcatcctttttcgtatccggatccttttcttcagaataatagattgacgactttggtgtagaggattctgccagcctctgtgagaacttgttaaagaagtccatttaaggctttaaaattgaattgcgattataagattaaatggcagacacagacgatattatcgactatgaatccgatgatctcaccgaatacgaggatgatgaagaagaggaagaagatggagagtcactagaaactagtgatatagatcccaaatcttcttataagattgtagaatcagcatccactcatatagaagatgcgcattccaatcttaaacatatagggaatcatatatctgctcttaaacgacgctatactagacgtataagtctatttgaaatagcgggtataatagcagaaagctataacttgcttcaacgaggaagattacctctagtttcagaattttctgacgaaacgatgaagcaaaatatgctacatgtaattatacaagagatagaggagggttcttgtcctatagtcatcgaaaagaacggagaattgttgtcggtaaacgattttgacaaagatggtctaaaattccatctagactatattatcaaaatttggaaacttcaaaaacgatattagaatttatacgaatatcgttctctaaatgtcacaatcaagtctcgcatgttcagcaatttattgtcgtactttatatcgtgttcattaacgatatcttgcaaaatagtaatgattctatcttccttcgatagatattcttcagagattattgtcttatattctttcttgttatcagatatgaatttgataagactttgaacattattgatacccgtctgtttaattttttctacagatattttagttttggcagattctatcgtatctgtcaatagacatccaacatcgacattcgacgtcaattgtctataaatcaacgtataaattttagaaataacattagcgaattgttgtgcgttgatgtcgttattctgaaacagtatgattttaggtagcattttcttaacaaagagaacgtatttattgttactcagttgaacagatgatatatccagattactaacgcatctgattccgtataccaaactttcagaagaaatggtatacaattgtttgtattcattcaatgtctctttttcagaaattagtttagagtcgaatactgcaataattttcaagagatagttttcatcagataagattttatttagtgtagatatgataaaactattgttttgttggagaacttgatacgccgcgttctctgtagtcgacgctctcaaatgggaaacaatctccattatttttttggaatcggatactatatcttcggtatcttgacgcagtctagtatacatagagttaagagagattagagtttgtacattaagcaacatgtctctaaatgtggctacaaacttttcctttttcacatcatctagtttattatataccgatttcacaacggcaccagatttaaggaaccagaatgaaaaactctgataactacaatatttcatcatagttacgattttatcatcttctatagttggtgtaatagcgcatacctttttctccaagactggaaccaacgtcataaaaatgtttaaatcaaaatccatatcaacatctgatgcgctaagaccagtctcgcgttcaagattatctttactaatggtgacgaactcatcgtataaaactctaagtttgtccattatttatttacagatttagttgtttaatttatttgtgctcttccagagttgggatagtatttttctaacgtcggtattatattattaggatctacgttcatatgtatcataatattaatcatccacgttttgataaatctatctttagcttctgaaataacgtatttaaacaaaggagaaaaatatttagctacggcatcagacgcaataacattttttgtaaatgtaacgtatttagacgacagatcttcgttaaaaagttttccatctatgtagaatccatcggttgttaacaccattcccgcgtcagattgaataggagtttgaatagtttgttttggaaatagatccttcaataacttatagttgggtgggaaaaaatcgattttatcactagactctttcttttttactatcattacctcatgaactatttcttgaatgagtatatgtattttctttcctatatcggacgcgttcattggaaaatataccatgtcgttaactataagaatatttttatcctcgtttacaaactgaataatatcagatgtagttcgtaaacgaactatatcatcaccagcacaacatctaactatatgatatccactagtttcctttagccgtttattatcttgttccatattagcagtcattccatcatttaagaaggcgtcaaaaataatagggagaaatgacattttggattctgttacaactttaccaaaattaaggatatacggacttactatctttttctcaacgtcaatttgatgaacacacgatgaaaatgtgcttctatgagattgatcatgtagaaaacaacaagggatacaatatttccgcatatcatgaaatatattaagaaatcccaccttattatatttccccaaaggatccatgcacgtaaacattatgccgttatcattaataaagacttctttctcatcggatctgtaaaagttgttactgatttttttcattccaggatctagataattaataatgatgggttttctattcttattctttgtattttggcatatcctagaccagtaaacagtttccactttggtaaaatcagcagacttttgaacgctattaaacatggcattaatggcaataactaaaaatgtaaaatatttttctatgttaggaatatggtttttcactttaatagatatatggtttttggccaaaatgatagatatttttttatccgaggatagtaaaatattattagtcgccgtctctataaaaatgaagctagtctcgatatccaattttattctagaattgataggagtcgccaaatgtaccttatacgttatatctcccttgatgcgttccatttgtgtatctatatcggacacaagatctgtaaatagttttacgttattaatcatcacggtatcgccgtcgctagataacgctaatgtaccatccaagtcccaaatggagagatttaactgttcatcgtttagaataaaatgattaccggtcatattaataaagtgttcatcgtatctagataacaacgacttataattaatgtccaagtcttgaactcgctgaatgatcttttttaacccagttagttttagattggtacgaaatatattgttaaactttgattctacagtaatgtccaaatctagttgtggaaatacttccatcaacattgtttcaaacttgataatattattatctacatcttcgtacgatccaaattccggaatagatgtatcgcacgctctggccacccagataaccaaaaagtcacacgctccaggatatacattgtataaaaagctatcgttttttagtagggtttttttctgcgtgtatacgaagggattaaaaatagtattatcaacgtaactatattccaaattattcttatgagaatagataataatatcgtccttaatatctaacaaatttcctaaatatccctttaattgagtcattcgaagcgtcaatagaatatgtctcttaactatttccggctgttgtatatttaaatgacttcgtaaaaaataatatatgggcgacttctcatctatgtaatcatatggagtgagatatagggctcgttctacctcctgccccttacccacctgtaataccaattgcggacttactatatatcgcatatttatatcgtggggtaaagtgaaaatctactaccgatgatgtaagtcttacaatgttcgaaccagtaccagatcttaatttggaggcctccgtagaactaggggaggtaaatatagatcaaacaacacctatgataaaggagaatagcggttttatatcccgcagtagacgtctattcgcccatagatctaaggatgatgagagaaaactagcactacgattctttttacaaagactttattttttagatcatagagagattcattatttgttcagatgcgttgacgctgtaaaagacgtcactattaccaaaaaaaataacattatcgtggcgccttatatagcacttttaactatcgcatcaaaaggatgcaaacttacagaaacaatgattgaagcattctttccagaactatataatgaacatagtaagaaatttaaattcaactctcaagtatccatcatccaagaaaaactcggataccagtttggaaactatcacgtttatgattttgaaccgtattactctacagtagctctggctattcgagatgaacattcatctggcatttttaatatccgtcaagagagttatctggtaagttcattatctgaaataacatatagattttatctaattaatctaaaatctgatcttgttcaatggagtgctagtacgggcgctgtaattaatcaaatggtaaatactgtattgattacagtgtatgaaaagttacaactggtcatagaaaatgattcacaatttacatgttcattggctgtggaatcaaaacttccaataaaattacttaaagatagaaatgaattatttacaaaattcattaacgagttaaaaaagaccagttcattcaagataagcaaacgcgataaggatacgctactaaaatattttacttaggactggagttagaatttatagacgactcatttcgtttatcattgttactattattactattactatcattattagtgttggcattattagtattcttcttgtcatcttgttcagaaatatacagcaatgctatacctaatactaaatacattatcatgctcgcaatggctctaacaacaacgaaccaaaatgaatttggtcgtagcttttgttcacaaaaatacataaagaaatgtctacataaatctatggcgccattggctacttgaaatagcgccagtcctcctacagattttaatatagctgtataacatgacatttattcatcatcaaaagagacagagtcaccatctgtcatatttagattttttttcatgtgttcaaagtatcctctactcatttcattataatagtttatcatacttagaattttaggacggatcaatgagtaagacttgactagatcgtcagtagtaatttgtgcatcgtctattctgcatccgcttcgtcgaataatgtatagcatcgctttgagattctccatagctatcaagtctttatacaatgacatggaaatatctgtgaatactttatacttctccaacatcgatgccttaacatcatcgcctactttagcattgaaaatacgttctattgtgtagatggatgtagcaagatttttaaacaacaatgccatcttacacgatgattgcctcaagtctccaatcgtttgtttagaacgattagctacagagtccaatgcttggctgactagcatattattatctttagaaattgtattcttcaatgaggcgtttatcatatctgtgatttcgttagtcatattacagtctgactgggttgtaatgttatccaacatatcacctatggatacggtacacgtaccagcatttgtaataatcctatctaagatgttgtatggcattgcgcagaaaatatcttctcctgtaatatctccactctcgataaatctactcagattattcttaaatgccttattctctggagaaaagatatcagtgtccatcatttcattaatagtatacgcagaaaagataccacgagtatcaattctatccaagatacttatcggttccgagtcacagataatggtttcctctccttcgggagatcctgcatagaaatatctaggacaatagtttctatactgtctgtaactctgataatctctaaagtcactaactgataccatgaaattgagaagatcaaacgctgaagtaattaatttttctgcctcgtttttactacaactagttttcatcaatgtagtgacgatgtattgtttagttacttttggtctaatactgatgatagagatattattgcttcccataatggatcttctagtagtcaccttaaagcccattgatgcgaatagcagatagataaagtcttggtatgactcctttctaatatagtacggactacctttgtcacccaactttatacccacataagccataacaacctctttaatagccgtttcatgaggtttatcagccatgagcctgagtagttggaagaatctcatgaatcccgtctcagaaagtcctatatgcatgatagatttatctttcctgggaaactctcgtatagtcatagatgaaatactctttaaagtttctgaaataagattagtaacagtcttacctccgactactctaggtaacaaacaaactctaataggtgttttctctgcggagataatatcagaaaggatagagcaataagtagtattattgtgattataaagaccgaatacataacaggtagaatttataaacatcatgtcctgaaggtttttagacttgtattcctcgtaatccataccgtcccaaaacatggatttggtaactttgatagccgtagatctttgttccttcgccaacaggttaaagaaattaataaagaatttgttgtttctatttatgtccacaaattgcacgtttggaagcgccacggttacattcactgcagcattttgaggatcgcgagtatgaagtacgatgttattgtttactggtatatctggaaagaaatctaccagtctaggaataagagattgatatcgcatagaaatagtaaagtttataatctcatcatcgaagagcattttgttaccattgtaataaatatccactctgtcatatgtataaatgaagtactgttcaaacatgatgagatgtttatatgttggcatagtagtgagatcgacgtttggtaatggcaatgtattaagattaactccataatgtctagcagcatctgcgatgttataagcgtcgtcaaagcggggtcgatcttgtattgttatatattgtctaacacctataagattatcaaaatcttgtctgcttaatacaccgttaacaatttttgccttgaattcttttattggtgcattaataacatccttatagaggatgttaaacaaataagtgttatcaaagttaagatctggatatttcttttctgctagaacatccattgagtcggagccatctggtttaatataaccaccgataaatctagctctgtattctgtatccgtcaatctaatattaagaaggtgttgagtgaaaggtggaagatcgtaaaagctgtgagtattaatgataggattagtttccgaactaatgttaattggggtattaataatatctatatttccagcgttaagtgtaacattaaacagttttaattcacgtgacgtggtatcaattaaataattaatgcccaatttggatatagcagcctgaagctcatcttgtttagttacggatcctaatgagttattaagcaatatatcgaacggatgaacgaaggttgttttaagttggtcacatactttgtaatctagacatagatgcggaagaacggtagaaactatacgaaataaatattcagagtcctctaattgatcaagagtaactattgacttaataggcatcatttatttagtattaaatgacgaccgtaccagtgacggatatacaaaacgatttaattacagagttttcagaagataattatccatctaacaaaaattatgaaataactcttcgtcaaatgtctattctaactcacgttaacaacgtggtagatagagaacataatgccgccgtagtgtcatctccagaggaaatatcctcacaacttaatgaagatctatttccagatgatgattcaccggccactattatcgaacgagtacaacctcatactactattattgacgatactccacctcctacgtttcgtagagagttattaatatcggaacaacgtcaacaacgagaaaaaagatttaatattacagtatcgaaaaatgctgaagcaataatggaatctagatctatgataacttctatgccaacacaaacaccatccttgggagtagtttatgataaagataaaagaattcagatgttagaggatgaagtggttaatcttagaaatcaacgatctaatacaaaatcatctgataatttagataattttaccaaaatactatttggtaagactccgtacaaatcaacagaagttaataagcgtatagccatcgttaattatgcaaatttgaacgggtcccccttatcagtcgaggacttggatgtttgttcggaggatgaaatagatagaatctataaaacgattaaacaatatcacgaaagtagaaaacgaaaaattatcgtcactaacgtgattattattgtcataaacattatcgagcaggcattgctaaaactcggatttgaagaaatcaaaggactgagtaccgatatcacttcagaaattatcgatgtggagatcggagatgactgcgatgctgtagcatctaaactaggaatcggtaacagtccggttcttaatattgtattgtttatactcaagatattcgttaaacgaattaaaattatttaatttaatacattcccatatccagacaacaatcgtctggattaatctgttcctgtcgtctcataccggacgacatattaatctttttattagtgggcatctttttagatggtttctttttcccagcattaactgagtcgatacctagaagatcgtgattgatctctccgaccattccacgaacttctaattggccgtctctgacggtaccataaactattttaccagcattagtaacagcttggacaatctgaccatccatcgcattgtacgatgtagtagtaactgttgttctacgtctaggagcaccagaagtatttttggagcccttggatgttgatgtagaagaagacgaggattttgattttggtttacatgtaatacattttgaactctttgattttgtatcacatgcgccggcagtcacatctgtttgagaattaagattattgttgcctcctttgacggctgcatctccaccgatttgcgctagtagatttttaagctgtggtgtaatcttattaactgtttcgatataatcatcgtaactgcttctaacggctaaattttttttatccgccatttagaagctaaaaatatttttatttatgcagaagatttaactagattatacaatgaactaatatgatccttttccagattatttacaaacttggtattttttggttctggaggaggcgaatttaaattcggacttggattcggattttgtaagttcttgatcttattatacatcgagtataggatggcgacagtaactgctacacaaataccgatcaaaagaagaataccaatcatttattgacaataacttcactattgatcaagtatgcaatatatcatcttttcactaaataagtagtaataatgattcaacaatgtcgagatatatggacgataataatttagttcatggaaatatcgctatgattggtgtgaatgactccgctaactctgtggggtgcgcagtgctttccccacatagaataaattagcattccgactgtgataataataccaagtataaacgccataatactcaatactttccatgtacgagtgggactggtagacttactaaagtcaataaaggcgaagatacacgaaagaatcaaaagaatgattccagcgattagcacgccggaaaaataatttccaatcataagcatcatgtccatttaactaataaaaattttaaatcgccgaatgaacaaagtggaatataaaccatataaaaacaatagtttgtactgcaaaaataatatctatttttgttttcgaagatatggtaaaattaaatagtagtacacagcatgttataactaacagcagcaacggctcgtaattacttatcatttactagacgaaaaggtggtgggatattttcttgctcaaataatacgaatatatcacccatccattttatgcgatgtttatatactctaatctttaatagatctatagacgacgggtttaccaacaatatagattttatcgattcatctaatttaaacccttccttaaacgtgaatgatctattatctggcataacgatgaccctacctgatgaatcggacaatgtactgggccatgtagaataaattatcaacgaattatcgtctacgaacatttatatcatttgttttaattttaggacgcgaataaatggatataaaatagaaaataacagatattacaaccagtgttatggccgcgcccaaccaggtaggcagttttattttatcttttactacaggttctcctggatgtacgtcaccaacggcggacgtagttctagtacaattagacgtaagttccgcttgggaattttttaacgctaaagagttaacgttaatcgtgcacccaacgtatttacatctagttcgttgaacatcttgattataatataaccattttctatctctagattcgtcagtgcactcatgtaaccaacataccctaggtcctaaatatttatctccggaattagattttggataattcgcgcaccaacaatttctatttcctttatgatcgttacaaaagacgtataatgccgtatccccaaaagtaaaataatcaggacgaataattctaataaactcagaacaatatctcgcatccatatgtttggagcaaatatcggaataagtagacatagccggtttccgttttgcacgtaaccattctaaacaattggggtttccaggatcgtttctacaaaatccagtcatgaaatcgtcacaatgttctgtcttgtaattattattaaatatttttggacagtgtttggtatttgtcttagaacaacattttgccacgctatcactatcgcccaggagataatccttttttataaaatgacatcgttgcccggatgctatataatcagtagcgtgttttaaatccttaatatattcaggagttacctcgttctgataatagattaatgatccaggacgaaatttgaaagaactacatggttctccatgaattaatacatattgtttagcaaattcaggaactataaaactactacaatgatctatcgacataccatctatcaaacaaaacttgggtttaatttctcccggagatgtttcataatagtacgtataactttcttctgcaaacttaacagctctattatattcaggataattaaaacctaattccatatatttgtctcgtatatctgctattcctggtgctattttgattctattaagagtaacagctgcccccattcttaataatcgtcagtatttaaactgttaaatgttggtatatcaacatctaccttatttcccgcagtataaggtttgttgcaggtatactgttcaggaatggttacatttatacttcttctatagtcctgtctttcgatgttcatcacatatgcaaagaacagaataaacaaaataatgtaagaaataatattaaatatctgtgaattcgtaaatacattgattgccataataattacagcagctacaatacacacaatagacattcccacagtgttgccattacctccacgatacatttgagttactaagcaataggtaataactaagctagtaagaggcaatagaaaagatgagataaatatcatcaatatagagattagaggagggctatatagagccaagacgaacaaaatcaaaccgagtaacgttctaacatcattatttttgaagattcccaaataatcattcattcctccataatcgttttgcatcatacctccatctttaggcataaacgattgctgctgttcctctgtaaataaatctttatcaagcactccagcacccgcagagaagtcgtcaagcatattgtaatatcttaaataactcatttatatattaaaaaatgtcactattaaagatggagtataatctttatgccgaactaaaaaaaatgacttgtggtcaacccctaagtctttttaacgaagacggggatttcgtagaagttgaaccgggatcatcctttaagtttctgatacctaagggattttacgcctctccttccgtaaagacgagtctagtattcgagacattaacaacgaccgataataaaatcactagtatcaatccaacaaatgcgccaaagttatatcctcttcaacgcaaagtcgtatctgaagtagtttctaatatgaggaaaatgatcgaatcaaaacgtcctctatacatcactcttcacttggcgtgtggatttggtaagactattaccacgtgttatcttatggctacacacggtagaaaaaccgtcatttgcgtacccaataaaatgttaatacatcaatggaagacacaggtagaggcagtcggattggaacataagatatccatagatggagtaagtagtctattaaaggaactaaagactcaaagtccggatgtattaatagtagtcagtagacatctgacaaacgatgccttttgtaaatatatcaataagcattatgatttgttcatcttggatgaatcacatacgtataatctgatgaacaatacagcagttacaagatttttagcgtattatcctccgatgatgtgttattttttaactgctacacctagaccatctaaccgaatttattgtaacagtattattaatattgccaagttatccaatctaaaaaaaactatctatgcagtagatagtttttttgagccatattccacagataatattagacatatggtaaaacgactagatggaccatctaataaatatcatatatataccgagaagttattatctgtagacgagcctagaaatcaacttattcttgataccctggtagaagaattcaagtcaggaactattaatcgcattttagttattactaaactacgtgaacatatggtattattctacaaacgattattagattttttcggaccagaggttgtatttataggagacgcccaaaatagacgtactccagatatggtcaaatcaatcaaggaactaaatagatttatattcgtatccaccttattttattccggtactggtttagatattcctagtttggattcgttgttcatttgctcggcagtaatcaacaatatgcaaatagagcaattactagggagggtatgtcgagaaacagaactattagataggacggtatatgtatttcctaacacatccatcaaagaaataaagtacatgataggaaatttcatgcaacgaattattagtctgtctgtagataaactaggatttaaacaaaaaagttatcggaaacatcaagaatccgatcccacttctgcatgtacaacatcatccagagaagaacgtgtattaaatagaatatttaactcgcaaaatcgttaagaagtttaagcgacgatccgcatgctgcgcaggccagtgtattacccctcatagtattaatataatccaatgatacttttgtgatgtcggaaatcttaaccaatttagactgacaggcagaacacgtcatgcaatcatcatcgtcatcgataactgtagtcttgggcttctttttgcgactcttcattccggaacgcacattggtgctatccatttaggtagtaaaaaataagtcagaatatgccctataacacgatcgtgcaaaacctggtatatcgtctctatctttatcacaatatagtgtatcgacatttttattattattgacctcgtttatcttggaacatggaatgggaacatttttgttatcaacggccatctttgccttaattccagatgttgtaaaattataactaaacagtctatcatcgacacaaatgaaattcttgtttagacgtttgtagtttacgtatgcggctcgttcgcgtctcattttttcagatattgcaggtactataatattaaaaataagaatgaaataacataggattaaaaataaagttatcatgacttctagcgctgatttaactaacttaaaagaattacttagtctgtacaaaagtttgagattttcagattctgcggctatagaaaagtataattctttggtagaatggggaacatctacttactggaaaataggcgtgcaaaaggtagctaatgtcgagacgtcaatatctgattattatgatgaggtaaaaaataaaccgtttaatattgatccgggctattacattttcttaccggtatattttgggagcgtctttatttattcgaagggtaaaaatatggtagaacttggatctggaaactcttttcaaataccagatgatatgcgaagtgcgtgtaacaaagtattagacagcgataacggaatagactttctgagatttgttttgttaaacaatagatggataatggaagatgctatatcaaaatatcagtctccagttaatatatttaaactagctagtgagtacggattaaacatacccaaatatttagaaattgaaatagaggaagacacattatttgacgacgagttatactctattatagaacgctctttcgatgataaatttccaaaaatatccatatcgtatattaagttgggagaacttagacggcaagttgtagactttttcaaattctcattcatgtatattgagtccatcaaggtagatcgtataggagataatatttttattcctagcgttataacaaaatcaggaaaaaagatattagtaaaagatgtagaccatttaatacgatccaaggttagagaacatacatttgtaaaagtaaaaaagaaaaacacattttccattttatacgactatgatggaaacggaacagaaactagaggagaagtaataaaacgaattatagacactataggacgagactattatgttaacggaaagtatttctctaaggttggtagtgcaggcttaaagcaattgactaataaattagatattaatgagtgcgcaactgtcgatgagttagttgatgagattaataaatccggaactgtaaaacgaaaaataaaaaaccaatcagcatttgatttaagcagagaatgtttgggatatccagaagcggattttataacgttagttaataacatgcggttcaaaatagaaaattgtaaggttgtaaatttcaatattgaaaatactaattgtttaaataacccgagtattgaaactatatatggaaactttaaccagttcgtctcaatctttaatgtcgtcaccgatgtcaaaaaaagattattcgagtgaaataatatgcgcctttgatataggtgcaaaaaatcctgccagaactgttttagaagtcaaggataactccgttagggtattggatatatcaaaattagactggagttctgattgggaaaggcgcatagctaaagatttgtcacaatatgaatacactacagttcttctagaacgtcagcctagaaggtcgccgtatgttaaatttatctattttattaaaggctttttatatcatacatcggctgccaaagttatttgcgtctcgcctgtcatgtctggtaattcatatagagatcgaaaaaagagatcggtcgaagcatttcttgattggatggacacattcggattgcgagactccgttccggatagacgcaaattagacgatgtagcggatagtttcaatttggctatgagatacgtattagataaatggaatactaattatacaccttataataggtgtaaatctagaaattacataaaaaaaatgtaataacgttagtaacgccattatggataatctatttacctttctacatgaaatagaagatagatatgccagaactatttttaactttcatctaataagttgcgatgaaataggagatatatatggtcttatgaaagaacgcatttcctcagaggatatgtttgataatatagtgtataataaagatatacatcctgccattaagaaactagtgtattgcgacatccaacttactaaacacattattaatcagaatacgtatccggtatttaacgattcttcacaagtgaaatgttgtcattatttcgacataaactcagataatagcaatattagctctcgtacagtagagatatttgagagggaaaagtcatctcttgtatcatatattaaaactaccaataagaagagaaaggtcaattacggcgaaataaagaaaactgttcatggaggcactaatgcaaattacttttccggtaaaaagtctgacgagtatctgagtactacagttagatccaacattaatcaaccttggatcaaaaccatctctaagaggatgagagttgatatcattaatcactctatagtaacgcgtggaaaaagctctatattacaaactatagaaattatttttactaatagaacatgtgtgaaaatattcaaggattctactatgcacattattctatccaaggacaaggatgaaaaggggtgtatacacatgattgacaaattattctatgtctattataatttatttctgttgttcgaagatatcatccaaaacgagtactttaaagaagtagctaatgttgtaaaccacgtactcacggctacggcattagatgagaaattattcctaattaagaaaatggctgaacacgatgtttatggagttagcaatttcaaaatagggatgtttaacctgacatttattaagtcgttggatcataccgttttcccctctctgttagatgaggatagcaaaataaagttttttaaggggaaaaagctcaatattgtagcattacgatctctggaggattgtataaattacgtgactaaatccgagaatatgatagaaatgatgaaggaaagatcgactattttaaatagcatagatatagaaacggaatcggtagatcgtctaaaagaattgcttctaaaatgaaaaaaaacactaattcagaaatggatcaacgactagggtataagtttttggtgcctgatcctaaagccggagttttttatagaccgttacatttccaatatgtatcgtattctaattttatattgcatcgattgcatgaaatcttgaccgtcaagcggccactcttatcgtttaagaataatacagaacgaattatgatagaaattagcaatgttaaagtgactcctccagattactcacctataatcgcgagtattaaaggtaagagttatgacgcattagccacgttcactgtaaatatctttaaagaggtaatgaccaaagagggtatatccatcactaaaataagtagttatgagggaaaagattctcatttgataaaaattccgctactaataggatacgggaataaaaatccacttgatacagccaagtatcttgttcctaatgtcataggtggagtctttatcaataaacaatctgtcgaaaaagtaggaattaatctagtagaaaagattacaacatggccaaaatttagggttgttaagccaaactcattcactttctcgttttcctccgtatcccctcctaatgtattaccgacaagatatcgccattacaagatatctctggatatatcacaattggaagcgttgaatatatcatcgacaaagacatttataacggtcaatattgttttgctgtctcaatatttatctagagtgagtctagaattcattagacgtagtttatcatacgatatgcctccagaagttgtctatctagtaaacgcgataatagatagtgctaaacgaattactgaatctattactgactttaatattgatacatacattaatgacctggtggaagctgaacacattaaacaaaaatctcagttaacgatcaacgagttcaaatatgaaatgctgcataactttttacctcatatgaactatacacccgatcaactaaagggattttatatgatatctttactaagaaagtttctctactgtatcttccacacttctagatatccagatagagattcgatggtttgtcatcgcatcctaacgtacggcaaatattttgagacgttggcacatgatgaattagagaattacataggcaacatccgaaacgatatcatgaacaatcacaagaacagaggcacttacgcggtaaacattcatgtactaacaactcccggacttaatcacgcgttttctagcttattgagtggaaagttcaaaaagtcagacggtagttatcgaacacatcctcactattcatggatgcagaatatttctattcctaggagtgttggattttatccggatcaagtaaagatttcaaagatgttttctgtcagaaaataccatccaagtcaatatctttacttttgttcatcagacgttccggaaagaggtcctcaggtaggtttagtatctcaattgtctgtcttgagttccattacaaatatactaacgtctgagtatttggatttggaaaagaaaatttgtgagtatatcagatcatattataaagatgatataagttactttgaaacaggatttccaatcactatagaaaatgctctagtcgcatctcttaatccaaatatgatatgtgattttgtaactgactttagacgtagaaaacggatgggattcttcggtaacttggaggtaggtattactttagttagggatcacatgaatgaaattcgcattaatattggagcgggaagattagtcagaccattcttggttgtggataacggagagctcatgatggatgtgtgtccggagttagaaagcagattagacgacatgacattctctgacattcagaaagagtttccgcatgtcatcgaaatggtagatatagaacaatttacttttagtaacgtatgtgaatcggttcaaaaatttagaatgatgtcaaaggatgaaagaaagcaatacgatttatgtgactttcctgccgaatttagagatggatatgtagcatcttcattagtgggaatcaatcacaattctggacccagagctattcttggatgtgctcaagctaaacaagctatctcttgtctgagctcggatatacgaaataaaatagacaatggaattcatttgatgtatccagagaggccaatcgtgattagtaaggctttagaaacttcaaagattgcggctaattgcttcggccaacatgttactatagcattaatgtcgtacaaaggtatcaatcaagaggatggaattatcatcaaaaaacaatttattcagagaggcggtctcgatattgttacagccaagaaacatcaagtagaaattccattggaaaactttaataacaaagaaagagataggtctaacgcctattcaaaattagaaagtaatggattagttagactgaatgctttcttggaatccggagacgctatggcacgaaatatctcatcaagaactcttgaagatgattttgctagagataatcagattagcttcgatgtttccgagaaatataccgatatgtacaaatctcgcgttgaacgagtacaagtagaacttactgacaaagttaaggtacgagtattaaccatgaaagaaagaagacccattctaggagacaaatttaccactagaacgagtcaaaagggaacagtcgcgtatgtcgcggatgaaacggaacttccatacgacgaaaatggtatcacaccagatgtcattattaattctacatccatcttctctagaaaaactatatctatgttgatagaagttattttaacagccgcatattctgctaagccgtacaacaataagggagaaaaccgacctgtctgttttcctagtagtaacgaaacatccatcgatacatatatgcaattcgctaaacaatgttatgagcattcaaatccgaaattgtccgatgaagaattatcggataaaatcttttgtgaaaagattctctatgatcctgaaacggataagccttatgcatccaaagtattttttggaccaatttattacttgcgtctgaggcatttaactcaggacaaggcaaccgttagatgtagaggtaaaaagacgaagctcattagacaggcgaatgagggacgaaaacgtggaggaggtatcaagttcggagaaatggagagagactgtttaatagcgcatggtgcagccaatactattacagaagttttgaaagattcggaagaagattatcaagatgtgtatgtttgtgaaaattgtggagacatagcagcacaaatcaagggtattaatacatgtcttagatgttcaaaacttaatctctctcctctcttaacaaaaattgataccacgcacgtatctaaagtatttcttactcaaatgaacgccagaggcgtaaaagtcaaattagatttcgaacgaaggcctccttcgttttataaaccattagataaagttgatctcaagccgtcttttctggtgtaatattctagtttggtagtagatacatatcaatatcatcaaattcgagatccgaattataaaatgggcgtggattgttaactatagaatcggacgtctgatattcgaaaatctgtggagtttcaggttttggtggaggtgtaactgctacttgggatactgaagtctgatattcagaaagctgtggatgttctggttcggcatccaccgatggtgtcacatcactaatcggttcggtaacgtctgtggatggaggtgctacttctacagaacctgtagcctcagttgtcaacggagatacatttttaatgcgagaaaatgtataatttggtaatggtttcttatgtggatctgaagaagaggtaagatatctactagaaagataccgatcacgttctagttctcttttgtagaacttaactttttctttctccgcatctagttgatattccaacctcttcacgttactacgttcagattccaattcacgttcgcatgggttacctccgcagtttttacgagcgatttcacgttcagccttcatgcgtctctccctctctctatcgagtttatcagagcagtctttctgaaggcgatcgaactccataaatttctccaacgctttgattgtttccatagatttccgaagttcagcttttaggactgtgattctttttctttcgaattcacagctggatgtacaaccgtttccattaccgccatctctaagtttcttttctagatcggcaacatttcatccccatgccttttacattcctcgagtctactgtcgtcgaaatatcgttccagctccttttcgacatcaataactttagcacgttgtctctcaagctctcttttgtagttatctgattccctggcacgtttaagatcttcatgcaattgagtcagctcttaacttcctctcttgcttcttcgtcatagtacgcgcaatcactgtgagatccattgttaccacgtctacactcggcgagctcgcgtttaagagattcaatttcccgtttgtattggtccatgtttccattgctaccaccattagatttacaggctgctagttgtcgttcgagatcagaaatacgggttttcttggaattgatttcgtcgatgtacttggcatcgaaacacttattaagttctttttccaattctacgattttatttctttcgcgagtcaattccctcctgtagtaactatctgttttgtcagattcacgctctctacgtagactttcttgcaagttactaatttgttccctagcacgtccgagtttagttttatatgctgaatagagttctgattcatcctttgagcagatctctagcgatcgtttaagattcctaattctagtctttagcctatttacctcctcagaagatgttccgttaccgttgcgtttacactcgttaagctgtctatcaagatccatgattctatctctaagacgttgcatctctctttccatatcagcattgctttcattattacgtctgcagtcactcaactgtctttcaatatctgagattctatctctaagacgtcgcatctctctctgtttcggcattggtttcattattacgtttacagtcgttcaactgtctttcaagatctgatattctagattggagtctgctaatctctgtagcattttcacggcattcactcagttgtctttcaagatctgaaattttagattggagtctgctaatctctgtaagatttcctcctccgctctcgatgcagtcggtcaacttattctctagttctctaatacgcgaacgcagtgcatcaacttcttgcgtgtcttcctggttgcgtgtacattcatcgagatctctaacgcgtcgtcgttcttcctcaagttctctgcgtactacagaaagcgtgtccctatcttgttgatatttagcaatttctgattctagagtactgattttgcttacgtagttactaatagttgtcttggccttatcaagatcctccttgtatttgtcgcattccttgatatccctacgaagtctggacagttcccattcgacattacgacgtttatcgatttcagctcggagatcgtcatcgcgttgttttagccacatacgactgagttcaagttctcgttgacaagatccatctacttttccattcctaatagtatccagttccttttctagttctgaacgcatttctcgttccctatcaagcgattctctcaattctcggatagtcttcttatcaatttctaataaatctgaaccatcatctgtcccattttgaatatccctgtgttctttgatctcttttgtaagtcggtcgattctttcggttttataaacagaatccctttccaaagtcctaatcttactgagtttatcactaagttctgcattcaattcggtgagttttctcttggcttcttccaactctgttttaaactctccactatttccgcattcttcctcgcatttatctaaccattcaattagtttattaataactagttggtaatcagcgattcctatagccgttcttgtaattgtgggaacataattaggatcttctaatggattgtatggcttgatagcatcatctttatcattattagggggatggacaaccttaattggttggtcctcatctcctccagtagcgtgtggttcttcaataccagtgttagtaataggcttaggcaaatgcttgtcgtacgcgggcacttcctcatccatcaagtatttataatcgggttctacttcagaatattcttttctaagagacgcgacttcgggagttagtagaagaactctgtttctgtatctatcaacgctggaatcaatactcaagttaaggatagcgaatacctcatcgtcatcatccgtatcttctgaaacaccatcatatgacatttcatgaagtctaacgtattgataaatagaatcagatttagtattaaacagatccttaacctttttagtaaacgcatatgtatattttagatctccagatttcataatatgatcacatgccttaaatgtcagtgcttccatgatataatctggaacactaatgggtgacgaaaaagatacagcaccatatgctacgttgataaataaatctgaaccactaagtagataatgattaatgttaagaaagaggaaatattcagtgtataggtatgtcttggcgtcatatcttgtactaaacacgctaaacagtttgttaatgtgatcaatttccaatagattaattagagcagcgggaataccaacaaacatattaccacatccgtattttctatgaatatcacatatcatgttaaaaaatcttgatagaagagcgaatatctcgtctgacttaatgagtcgtagttcagcagcaacataagtcataactgtaaatagaacatactttcctgtagtgttgattctagactccacatcaacaccattattaaaaatagttttatatacatctttaatctgctctccgttaatcgtcgaacgttctagtatacggaaacactttgatttcttatctgtagttaatgacttagtgatatcacgaagaatattacgaattacatttcttgtttttcttgagagacctgattcagaactcaactcatcgttccatagtttttctacctcagtggcgaaatctttggagtgcttggtacatttttcaataaggttcgtgacctccatttattataaaaaatttattcaaaacttaactacaatcgggtaattataagatcgtagatctcccatgtggcggaatactaccatctatcgcatgtggatggacagtaggtaatggccatgggaacagtaatgtttgcatatttatctttcttgctagtattactgcatattgtcccaatgtttcgatgtgatgttctaacctatcaactgccgctgtatcacaacaatagtgtccgatgaaattaagattatgatccaatgtgtttaatatatgattatcaagtcttatacgatccgcgtcttttttgacaggatcaggttcttctacaggaagaagtttcggcctcttatgatattcatgtctgggaaacggtggtctagggtgaggctccggtatcggagtgggttttggattataatcatcatcgtctatgacatcatcttcgacttcgatatttattttgctatcttgatgatgtcctgtatcagttgcattttcagcactcgactgaatattagcgcattcattgtctattattaccatatttctaaacccaaaatgtatgtgttgaacatcagtactatcgttgatgagtcttatagcatgaattcgcttatcgttatcgggtttatcttctgtcaccttagcaattccttttttattaaactctacataatcatatccatttctattgtttgttctaatataaacgagtatagcatcattgctaaatttttcaatagtatcaaaaacagaatatcctaaaccatataatatatattcaggaacactcaaactaaatgtccaggattctcctaaatacgtaaactttaatagtgcgaaatcattcaaaaatctaccacttatagatagatagtacataaatgcgtatagtagtctacctatctctttattatgaaaaccggcattacgatcatatatgtcgtgatatacctgtgatccgtttacgttaaaccataaatacatgggtgatcctataaacatgaatttatttctaattctcagagctatagttaattgaccgtgtaatatttgcttacatgcatacttgatacgcttattaataagatttttatcattgctcgttatttcagaatcgtatatataaggagtaccatcgtgattcttaccagatattatacaaaatactatatataaaatatattgacccacgttagtaatcatataaatgtttaacgttttaaattttgtattcaatgatccattatcatacgctatcatggtcttgtaatattcattctttaaaatataatattgtgttagccattgcattggagctcctaatggagattttctattctcatccattttaggataggctttcataaagtccctaataacttcgtgaataatgtttctatgttttctactgatgcatgtatttgcttcgatttttttatcccatgtttcatctatcatagatttaaacgcagtaatgctcgcaacattaacatcttgaaccgttggtacaattccgttccataaatttataatgttcgccatttatataactcattttttgaatatacttttaattaacaaaagagttaagttactcatatggacgccgtccagtctgaacatcaatctttttagccagagatatcatagccgctcttagagtttcagcgtgattttccaacctaaatagaacttcatcgttgcgtttacaacacttttctatttgttcaaactttgttgttacattagtaatctttttttccaaattagttagccgttgtttgagagtttcctcattgtcgtcttcatcggctttaacaattgcttcgcgtttagcctctggctttttagcagcctttgtagaaaaaaattcagttgctggaattgcaagatcgtcatctccggggaaaagagttccgtccatttaaagtacagattttagaaactgacactctgcgttatttatatttggtacaacacatggattataaatattgatgttaataacatcagaaaatgtaaagtctatacattgttgcatcgtgttaaattttctaatggatctagtattattgggtccaacttctgcctgaaatccaaatatggaagcggatacaaaaccgtttcctggataaaccacacatctccacttttgctttacatcagaaattgtgtcgttgacatcttgaactctcctatctaatgccggtgttccacctatagattttgaatattcgaatgctgcatgagtagcattaaattccttaatattgccataattttcatatattgagtaaccctggataaaaagtaaacacaccgcagccgtcgctaccacaataaaaaaaattgatagagagttcatttataatctattagaagctgacaaaatttttttacacgcatcagacaatgctttaataaatagttcaacatctacttttgtcatatcgaaccgatggtatgattctaacctagaattacatccgaaaaagttgactatgttcatagtcattaagtcattaacaaacaacattccagactctggattataagacgatactgtttcgtcacaattacctaccttaatcatgtgattatgaatattggctattagagcaccttctaagaaatctataatatctttgaaacacgatttaaaatcaaaccacgaatatacttctacgaagaaagttagtttacccataggagaaataactataaatggagatctaaatacaaaatccggatctatgatagttttaacattattatattctctattaaatacctccacatctaaaaatgttaattttgaaactatgtcttcgtttattaccgtacctgaactaaacgctataagctctattgtttgagaactctttaaacgatattcttgaaatacatgtaacaaagtttcctttaactcggtcggtttatctaccatagttacagaatttgtatccttatctataatataataatcaaaatcgtataaagttatataattatcgcgttcagattgtgatcttttcaaatagactaaaaaccccatttctctagtaagtatcttatgtatatgtttgtaaaatatcttcatggtgggaatatgctctaccgcagttagccattcctcattgacagcggtagatgtattagacaaaactattccaatgtttaacaagggccattttacgagattattaaatccttgtttgataaatgtagccaatgagggttcgagttcaacgacgattgaattctcttcccgcggatgctgcatgatgaacgacgggatgttgttcgattgatttggaattctttttcgactttttgtttatattaaatattttaaaatttatagcggatagcaattcatgtaccacggataatgtagacgcgtattgcgcatcgatatctttattattagataaatttatcaataaatgtgagaagtttgcctcgttaaggtcttccatttaaatattatataaacatttgtgtttgtatcttattcgtcttttatggaatagttttttactagtaaagctgcaattacacactttgtccgtaaaacataaatataaacaccagcttttatcaatcgttccaaaaagtcgacggcggacatttttaacatggcatctattttaaatacacttaggtttttggaaaaaacatcattttataattgtaacgattcaataactaaagaaaagattaagattaaacataagggaatgtcatttgtattttataagccaaagcattctaccgttgttaaatacttgtctggaggaggtatatatcatgatgatttggttgtattggggaaggtaacaattaataatctaaagatgatgctattttacatggatttatcatatcatggagtgacaagtagtggagcaatttacaaattgggatcgtctatcgatagactttctctaaataggactattgttacaaaagttaataattatgatgatacattttttgacgacgatgattgatcgctattgcacaattttgtttttgtactttctaatatagtgtttaggttctttttcatatgagaatattgatttactaaaatatctatgtttaacttttgttctatgacgtccttatcggcggtatcggtacatatacgtaattcaccttcacaaaatacggagtcttcgataataatagccaatcgattattggatctagctgtctgtatcatattcaacatgtttaatatatcctttcgtttcccctttacaggcatcgatcgtagcatattttccgcgtctgatatggaaatgttaaaactacaaaaatgcgtaatgttagcccgtcctaatattggtacgtgtctataagtttggcatagtagaataatagacgtgtttaaatgccttccaaagtttaagaattctattagagtattgcattttgatagtttatcgcctacatcatcaaaaataagtaaaaagtgtgctgattttttatgattttgtgcgacagcaatacatttttctatgttacttttagttcgtatcagattatattctagagattcctgactactaacgaaattaatatgatttggccaaatgtatccatcataatctgggttataaacgggtgtaaacaagaatatatgtttatattttttaactagtgtagaaaacagagatagtaaatagatagtttttccagatccagatcctcctgttaaaaccattctaaacggcatttttaataaattttctcttgaaaattgtttttcttggaaacaattcataattatatttacagttactaaattaatttgataataaatcaaaatatggaaaactaaggttgttagtagggaggagaacaaagaaggcacatcgtgatataaataacatttattatcatgatgacaccagaaaacgacgaagagcagacatctgtgttctccgctactgtttacggagacaaaattcagggaaagaataaacgcaaacgcgtgattggtctatgtattagaatatctatggttatttcactactatctatgattaccatgtccgcgtttctcatagtgcgcctaaatcaatgcatgtctgctaacgaggctgctattactgacgccgctgttgccgttgctgctgcatcatctactcatagaaaggttgcgtctagcactacacaatatgatcacaaagaaagctgtaatggtttatattaccagggttcttgttatatattacattcagactaccagttattctcggatgctaaagcaaattgcactgcggaatcatcaacactacccaataaatccgatgtcttgactacctggctcattgattatgttgaggatacatggggatctgatggtaatccaattacaaaaactacatccgattatcaagattctgatgtatcacaagaagttagaaagtatttttgtgttaaaacaatgaactaatatttatttttgtacattaataaatgaaatcgcttaatagacaaactgtaagtaggtttaagaagttgtcggtgccggccgctataatgatgatactctcaaccattattagtggcataggaacatttctgcattacaaagaagaactgatgcctagtgcttgcgccaatggatggatacaatacgataaacattgttatttagatactaacattaaaatgtctacagataatgcggtttatcagtgtcgtaaattacgagctagattgcctagacctgatactagacatctgagagtattgtttagtattttttataaagattattgggtaagtttaaaaaagaccaatgataaatggttagatattaataatgataaagatatagatattagtaaattaacaaattttaaacaactaaacagtacgacggatgctgaagcgtgttatatatacaagtctggaaaactggttaaaacagtatgtaaaagtactcaatctgtactatgtgttaaaaaattctacaagtgacaacaaaaaatgaattaataataagtcgttaacgtacgccgccatggacgccgcgtttgttattactccaatgggtgtgttgactataacagatacattgtatgatgatctcgatatctcaatcatggactttataggaccatacattataggtaacataaaaactgtccaaatagatgtacgggatataaaatattccgacatgcaaaaatgctactttagctataagggtaaaatagttcctcaggattctaatgatttggctagattcaacatttatagcatttgtgccgcatacagatcaaaaaataccatcatcatagcatgcgactatgatatcatgttagatatagaagataaacatcagccattttatctattcccatctattgatgtttttaacgctacaatcatagaagcgtataacctgtatacagctggagattatcatctaatcatcaatccttcagataatctgaaaatgaaattgtcgtttaattcttcattctgcatatcagacggcaatggatggatcataattgatgggaaatgcaatagtaattttttatcataaaagttgtaaagtaaataataaaacaataaatattgaactagtagtacgtatattgagcaatcagaaatgatgctggtacctcttatcacggtgaccgtagttgcgggaacaatattagtatgttatatattatatatttgtaggaaaaagatacgtactgtctataatgacaataaaattatcatgacaaaattaaaaaagataaagagttctaattccagcaaatctagtaaatcaactgatagcgaatcagactgggaggatcactgtagtgctatggaacaaaacaatgacgtagataatatttctaggaatgagatattggacgatgatagcttcgctggtagtttaatatgggataacgaatccaatgttatggcgcctagcacagaacacatttacgatagtgttgctggaagcacgctgctaataaataatgatcgtaatgaacagactatttatcagaacactacagtagtaattaatgaaacggagactgttgaagtacttaatgaagataccaaacagaatcctaactattcatccaatcctttcgtaaattataataaaaccagtatttgtagcaagtcaaatccgtttattacagaacttaacaataaatttagtgagaataatccgtttagacgagcacatagcgatgattatcttaataagcaagaacaagatcatgaacacgatgatatagaatcatcggtcgtatcattggtgtgattagtttcctttttataaaattgaagtaatatttagtattattgctgccgtcacgttgtacaaatggagatattccctgtattcggcatttctaaaattagcaattttattgctaataatgactgtagatattatatagatacagaacatcaaaaaattatatctgatgagatcaatagacagatggatgaaacggtacttcttaccaacatcttaagcgtagaagttgtaaatgacaatgagatgtaccatcttattcctcatagattatcgacgattatactctgtattagttctgtcggaggatgtgttatctctatagataatgacatcaatggcaaaaatattctaacctttcccattgatcatgctgtaatcatatccccactgagtaaatgtgtcgtagttagcaagggtcctacaaccatattggttgttaaagcggatatacctagcaaacgattggtaacatcgtttacaaacgacatactatatgtaaacaatctgtcactgattaattatttgccgttgtctgtattcattattagacgagtcaccgactatttggatagacacatatgcgatcagatatttgctaataataagtggtattcccttataaccatcgacgataagcaatatcctattccatcaaactgtataggtatgtcctctgccaagtacataaattctagcatcgagcaagatactttaatccatgtttgtaacctcgagcatccgttcgactcagtatacaaaaaaatgcagtcgtacaattctctacctatcaaggaacaaatattgtacggtagaattgataatataaatatgagcattagtatttctgtggattaatagatttctagtatggggatcattaatcatctctaatctctaaatacctcataaaacgaaaaaaaagctattatcaaatactgtacggaatggattcattctcttctctttttatgaaactctgttgtatatctactgataaaactggaagcaaaaaatctgatagaaagaataagaataagatcaaggattatatggaacacgattattataaaataacaatagttcctggttcctcttccacgtctactagctcgtggtattatacacatgcctagtaatagtctctttgcgttgacggaaagcagactagaaataacaggctaaaatgttcagacaccataatagttcccaacccagataataacagagttccatcaacacattcctttaaactcaatcccaaacccaaaaccgttaaaatgtatccggccaattgatagtagataatgaggtgtacagcgcatgataatttacacagtaaccaaaatgaaaatactttagtaattataagaaatatagacggtaatgtcatcatcaacaatccgataatatgcctgagagtaaacattgacggataaaacaaaaatgctccgcataactctatcatggcaataacacaaccaaatacttgtaagattcctaaattagtagaaaatacaacgaatatcgatgtataagtgatctcgagaaataataagaataaagtaatgcccgtaaagataaacatcaacattgtttggtaatcattaaaccaattagtatgaagttgaactaatttcacagtagattttattccagtgttatcctcgcatgtataagtacctggtaagatatctttatattccataatcaatgagacatcactatctgataacgaatgaagtctagcactagtatgccatttacttaatattgtcgtcttggaagttttattataagttaaaatatcatggttatccaatttccatctaatatactttgtcggattatctatagtacacggaataatgatggtatcattacatgctgtatactctatggtctttgtagttgttataacaaccaacgtatagaggtatatcaacgatattctaactcttgacattttttatttatttaaaatgatacctttgttatttattttattctattttgctaacggtattgaatggcataagtttgaaacgagtgaagaaataatttctacttacttattagacgacgtattatacacgggtgttaatggggcggtatacacattttcaaataataaactaaacaaaactggtttaactaataataattatataacaacatctataaaagtagaggatgcggataaggatacattagtatgcggaaccaataacggaaatcccaaatgttggaaaatagacggttcagacgacccaaaacatagaggtagaggatacgctccttatcaaaatagcaaagtaacgataatcagtcacaacggatgtgtactatctgacataaacatatcaaaagaaggaattaaacgatggagaagatttgacggaccatgtggttatgatttattcacggcggataacgtaattccaaaagatggtttacgaggagcattcgtcgataaagacggtacttatgacaaagtttacattcttttcactgatactatcggctcaaagagaattgtcaaaattccgtatatagcacaaatgtgcctaaacgacgaaggtggtccatcatcattgtctagtcatagatggtcgacgtttctcaaagtcgaattagaatgtgatatcgacggaagaagttatagacaaattattcattctagaactataaaaacagataatgatacgatactatatgtattcttcgatagtccttattccaagtccgcattatgtacctattctatgaataccattaaacaatctttttctacgtcaaaattggaaggatatacaaagcaattgccgtctccagctcctggtatatgtttaccagctggaaaagttgttccacataccacgtttgaagtcatagaacaatataatgtactagatgatattataaagcctttatctaaccaacctatcttcgaaggaccgtctggtgttaaatggttcgatataaaggagaaggaaaatgaacatcgggaatatagaatatacttcataaaagaaaattctatatattcgttcgatacaaaatctaaacaaactcgtagctcgcaagtcgatgcgcgactattttcagtaatggtaactgcgaaaccgttatttatagcagatatagggataggagtaggaatgccacaaatgaaaaaaatacttaaaatgtaatcttaatcgagtacaccacacgacaatgaacaaacataagacagattatgctggttatgcttgctgcgtaatatgcggtctaattgtcggaattatttttacagcgacactattaaaagttgtagaacgtaaattagttcatacaccattaatagataaaacgataaaagatgcatatattagagaagattgtcctactgactggataagctataataataaatgtatccatttatctactgatcgaaaaacctgggaggaaggacgtaatgcatgcaaagctctaaattcaaattcggatctaattaagatagagactccaaacgagttaagttttttaagaagccttagacgaggctattgggtaggagaatccgaaatattaaaccagacaaccccatataattttatagctaagaatgccacgaagaatggaactaaaaaacggaaatatatttgtagcacaacgaatactcccaaactgcattcgtgttacactatataacaattacactacatttttatcataccactacttcggttagatgttttagaaaaaaataaatatcgccgtaccgttcttgtttttataaaaataacaattaacaattatcaaattttttctttaatattttacgtggttgaccattcttggtggtaaaataatctcttagtgttggaatggaatgctgtttaatgtttccacactcatcgtatattttgacgtatgtagtcacatcgtttacgcaatagtcagactgtagttctatcatgcttcctacatcagaaggaggaacagttttaaagtctcttggttttaatctattaccgttagttttcatgaaatcctttgttttatccacttcacattttaaataaatgtccactatacattcttttgttaattttactagatcgtcatgggtcatagaatttataggttccgtagtccatggatccaaactagcaaacttcgcgtatacggtatcgcgattagtgtatacaccaactgtatgaaaattaagaaaacagtttaataaatcaacagaaatatttaatcctccgtttgatacagatgcgccatatttatggatttcggattcacacgttgtttgtctgaggtgttcgtctagtgttgcttctacgtaaacttcgattcccatatattctttattgtcagaatcgcataccgatttatcatcatacactgtttgaaaactaaatggtatacacatcaaaataataaataataacgagtacattctgcaatattgttatcgtaattggaaaaatagtgttcgagtgagttggattatgtgagtattggattgtatattttattttatattttgtaataagaataaaatgctaatgtcaagtttattccaatagatgtcttattaaaaacatatataataaataacaatggctgaatggcataaaattatcgaggatatctcaaaaaataataagttcgaggatgccgccatcgttgattacaagactacaaagaatgttctagctgctattcctaacagaacatttgccaagattaatccgggtgaaattattcctctcatcactaatcgtaatattctaaaacctcttattggtcagaaatattgtattgtatatactaactctctaatggatgagaacacgtatgctatggagttgcttactgggtacgcccctgtatctccgatcgttatagcgagaactcataccgcacttatatttttgatgggtaagccaacaacatccagacgtgacgtgtatagaacgtgtagagatcacgctacccgtgtacgtgcaactggtaattaaaataaaaagtaatattcatatgtagtgtcaattttaaatgatgatgatgaaatggataatatccatattgacgatgtcaataatgccggtattggcatacagttcatcgatttttagatttcattcagaggatgtggaattatgttatgggcatttgtattttgataggatctataatgtagtaaatataaaatataatccgcatattccatatagatataattttattaatcgcacgttaaccgtagatgaactagacgataatgtcttttttacacatggttattttttaaaacacaaatatggttcacttaatcctagtttgattgtctcattatcaggaaacttaaaatataatgatatacaatgctcagtaaatgtatcgtgtctcattaaaaatttggcaacgagtacatctactatattaacatctaaacataagacttattctctacatcggtccacgtgtattactataataggatacgattctattatatggtataaagatataaatgacaagtataatgacatctatgattttactgcaatatgtatgctaatagcgtctacattgatagtgaccatatacgtgtttaaaaaaataaaaatgaactcttaattatgctatgctattagaaatggataaaatcaaaattacggttgattcaaaaattggtaatgttgttaccatatcgtataacttggaaaagataactattgatgtcacacctaaaaagaaaaaagaaaaggatgtattattagcgcaatcagttgctgtcgaagaggcaaaagatgtcaaggtagaagaaaaaaatattatcgatattgaagatgacgatgatatggatgtagaaagcgcgtaatacgatctataaaaataagtatataaatactttttatttactgtactcttactgtgtagtggtgataccctactcgattatttttttaaaaaaaaaatacttattctgattcttctagccatttccgtgttcgtttgaatgccacatcgacgtcaaagataggggagtagttgaaatctagttctgcattgttggtacgcacctcaaatgtagtgttggatatcttcaacgtatagttgttgagtagtgatggttttctaaatagaattctcttcatatcattcttgcacgcgtacatttttagcatccatcttggaatcctagatccttgttctattcccaatggtttcatcaatagaagattaaacatatcgtacgaacacgatggagagtaatcgtagcaaaagtaagcatttcctttaatcttagatcccggatactggatatattttgcagccaacacgtgcatccatgcagcatttcctacatatacccggctatgcaccgcgtcatcatcgactgtacgatacataatgttaccgtgttgcttacattgctcgtaaaagactttcatcaatttgtctccttctccgtaaattccagtgggtcttaggcaacaagtatacaattttgctccattcatgattacggaattattggctttcataaccagttgctcggccatacgtttactttttgcgtatacatgtcctggtgatatatcataaagggtatgctcatggccgatgaatggatcaccgtgtttattgggtcctattgcttccatgctactagtatagatcaaatacttgattcctaggtccacacaagctgccaaaatagtctgtgttccataatagtttactttcatgatttcattatcggtgtattttccaaatacatccactagagcagccgtatgaataatcagatttaccccatctagcgcttctctcaccttatcaaagtcgtttatatcacattgtatatagtttataaccttaactttcgaggttattggttgtggatcttctacaatatctatgactctgatttcttgaacatcatctgcactaattaacagttttactatatacctgcctagaaatccggcaccaccagtaaccgcgtacacggccattgctgccactcataatatcagactacttattctattttactaaataatggctgtttgtataatagaccacgataatatcagaggagttatttactttgaaccagtccatggaaaagataaagttttaggatcagttattggattaaaatccggaacgtatagtttgataattcatcgttacggagatattagtcaaggatgtgattccataggcagtccagaaatatttatcggtaacatctttgtaaacagatatggtgtagcatatgtttatttagatacagatgtaaatatatttacaattattggaaaggcgttatctatttcaaaaaatgatcagagattagcgtgtggagttattggtatttcttacataaatgaaaagataatacattttcttacaattaacgagaatggcgtttgatatatcagttaatgcgtctaaaacaataaatgcattagtttacttttctactcagcaaaataaattagtcatacgtaatgaagttaatgatacacactacactgtcgaatttgatagggacaaagtagttgacacgtttatttcatataatagacataatgacaccatagagataagaggggtgcttccagaggaaactaatattggttgcgcggttagtatgacttacttgtataataagtatagttttaaactgattttagcagaatatataagacacagaaatactatatccggcaatatttattcggcattgatgacactagatgatttggctattaaacagtatggagacattgatctattatttaatgagaaacttaaagtagactccgattcgggactatttgactttgtcaactttgtaaaggatatgatatgttgtgattctagaatagtagtagctctatctagtctagtatctaaacattgggaattgacaaataaaaaatataggtgtatggcattagccgaacatatatctgatagtattccaatatctgagctatctagactacgatacaatctatgtaagtatctacgcggacacactgagagcatagaggataaatttgattattttgaagacgatgattcgtctacatgttctgccgtaaccgacagggaaacggatgtataattttttttatagcgtgaaggatatgataaaaaatataattgttgtatttatcccattccaatcaccttatatgattctgtaacacaataaaggagtcttatagatgtatagaggtcagatactggtttgataaactgtttattccacataagtatgtttgactttatggttagacccgcatactttaacaaatcactgaaaattggagttaggtattgacctctcagaatcagttgccgttctggaacattaaatgtattttttatgatatactccaacgcatttatgtgggcatacaacaagtcattactaatggaatattccaagagttttagttgtctagtatttaacaagagaagagatttcaacagactgtttatgaactcgaatgccgcctcattgtcgcttatattgatgatgtcgaattctcccaatatcatcaccgatgagtagctcatcttgttatcgggatccaagttttctaaagatgtcattaaaccctcgatcatgaatggatttatcatcatcgtttttatgttggacatgagcttagtccgtttgtccacatctatagaagatgatttctgaattatttcatatatctctctctttaactccaggaacttgtcaggatggtctactttaatatgttctcgtctaagagatgaaaatctttggatggttgcacgcgacttttctctaaaggatgacgttgcccaagatcctctcttaaatgaatccatcttatccttggacaagatggacagtctattttccttagatggtttaatatttttgttacccatgatctataaaggtagacctaatcgtctcggatgaccatatatttattttcagttttattatacgcataaattgtaaaaaatatgttaggtttacgaaaatgtctcgtggggcattaatcgtttttgaaggattggacaaatctggaaaaacaacacaatgtatgaacatcatggaatcaataccttcaaacacaataaaataccttaactttcctcagagatccactgtcactggaaagatgatagatgactatctaactcgtaaaaaaacctataatgatcatatagttaatctattattttgtgcaaatagatgggagtttgcatcttttatacaagaacaactagaacagggaattactttaatagttgatagatacgcattttctggagtagcgtatgccgccgctaaaggcgcgtcaatgactctcagtaagagttatgaatctggattgcctaaacccgacttagttatattcttggaatctggtagcaaagaaattaatagaaacgtcggtgaggaaatttatgaagatgttacattccaacaaaaggtattacaagaatataaaaaaatgattgaagaaggagatattcattggcaaattatttcttctgaattcgaggaagatgtaaagaaggagttgattaagaatatagttatagaggctatacacacggttactggaccagtggggcaactgtggatgtaatagtgaaattacattttttataaatagatgttagtacagtgttataaatggatgaagcatattactctggcaacttggaatcagtactcggatacgtgtccgatatgcataccgaactcgcatcaatatctcaattagttattgccaagatagaaactatagataatgatatattaaacaaggacattgtaaattttatcatgtgtagatcaaacttggataatccatttatctctttcctagatactgtatatactattatagatcaagagaactatcagactgagttgattaattcattagacgacaatgaaattatcgattgtatagttaataagtttatgagcttttataaggataacctagaaaatatagtagatgctatcattactctaaaatatataatgaataatccagattttaaaactacgtatgccgaagtactcggttccagaatagccgatatagatattaaacaagtgatacgtaagaatatactacaattgtctaataatatccgcgaacgatatttgtgaaaatattaaaaaaaaatactttttttattaaatgacgtcttttcgtgaatttagaaaattatgctgtgctatatatcacgcatcaggatataaagaaaaatctaaattaattagagactttataacagatagggatgataaatatttgatcattaagctattgcttcccggattagacgatagaatttataacatgaacgataaacaaattataaaattatatagtataatatttaaacaatctcaggaagatatgctacaagatttaggatacggatatataggagacactattaggactttcttcaaagagaacacagaaatccgtccacgagataaaagcattttaactttagaagaagtggatagttttttaactacgttatcatccgtaactaaagaatcgcatcaaataaaattattgactgatgtagcatctgtttgtacatgtaatgatttaaaatgtgtagtcatgcttattgataaagatctaaaaattaaagcgggtcctcggtacgtacttaacgctattagtcctaatgcctatgatgtgtttagaaaatctaataacttgaaagagataatagaaaattcatctaaacaaaatctagactctatatctatttctgttatgactccaattaatcccatgttagcggaatcgtgtgattctgtcaataaggcgtttaaaaaatttccatcaggaatgtttgcggaagtcaaatacgatggtgaaagagtacaagttcataaaaataataacgagtttgccttctttagtagaaacatgaaaccagtactctctcataaagtggattatctcaaagaatacataccgaaagcatttaaaaaagctacgtctatcgtattggattctgaaattgttcttgtagacgaacataatgtaccgctcccgtttggaagtttaggtatacacaaaaagaaagaatataaaaactctaacatgtgtttgttcgtgtttgactgtttgtactttgatggattcgatatgacggacattccattgtacgaacgaagatcttttctcaaagatgttatggttgaaatacccaatagaatagtattctcagagttgacgaatattagtaacgagtctcagttaactgacgtattggatgatgcactaacgagaaaattagaaggattggtcttaaaagatattaatggagtatacgaaccgggaaagagaagatggttaaaaataaagcgagactatttgaacgagggttccatggcagattctgccgatttagtagtactaggtgcctactatggtaaaggagcaaagggtggtatcatggcagtctttctaatgggttgttacgacgatgaatccggtaaatggaagacggttaccaagtgttcaggacacgatgataatacgttaagggagttgcaagaccaattaaagatgattaaaattaacaaggatcccaaaaaaattccagagtggttagtagttaataaaatctatattcccgattttgtagtagaggatccgaaacaatctcagatatgggaaatttcaggagcagagtttacatcttccaagtcccataccgcaaatggaatatccattagatttcctagatttactaggataagagaggataaaacgtggaaagaatctactcatctaaacgatttagtaaacttgactaaatcttaatagttacatacaaactgaaaattaaaataacactatttagttggtggtcgccatggatggtgttattgtatactgtctaaacgcgctagtaaaacatggcgaggaaataaatcatataaaaaatgatttcatgattaaaccatgttgtgaaagagtttgtgaaaaagtcaagaacgttcacattggcggacaatctaaaaacaatacagtgattgcagatttgccatatatggataatgcggtatccgatgtatgcaattcactgtataaaaagaatgtatcaagaatatccagatttgctaatttgataaagatagatgacgatgacaagactcctactggtgtatataattattttaaacctaaagatgccattcctgttatcatatctataggaaaggataaagatgtctgtgaactattaatctcatcagacatatcgtgtgcatgcgtggagttaaattcatatcacgtagccattcttcccatggatgtttccttttttaccaaaggaaatgcatcattgattattctcctgtttgatttctctatcgatgcggcacctctcttaagaagtgtaaccgataataatgttattatatctagacaccagcgtctacatgacgagcttccgagttccaattggttcaagttttacataagtataaagtccgactattgttctatattatatatggttgttgatggatctgtgatgcatgcgatagctgataatagaactcacgcaattattagcaaaaatatattagacaatactacgattaacgatgagtgtagatgctgttattttgaaccacagattaggattcttgatagagatgagatgctcaatggatcatcgtgtgatatgaacagacattgtattatgatgaatttacctgatgtaggcgaatttggatctagtatgttggggaaatatgaacctgacatgattaagattgctctttcggtggctggtaatttaataagaaatcgagactacattcccgggagacgaggatatagctactacgtttacggtatagcctctagataatttttttaagcacgaaataaaaaacataattttaaaccaatctatttcatactattttgtgtgatcaccatggacataaagatagatattagtatttctggtgataaatttacggtgactactaggagggaaaatgaagaaagaaaaaaatatctacctctccaaaaagaaaaaactactgatgttatcaaacctgattatcttgagtacgatgacttgttagatagagatgagatgtttactattctagaggaatattttatgtacagaggtctattaggcctcagaataaaatatggacgactctttaacgaaattaaaaaattcgacaatgatgcggaagaacaattcggtactatagaagaactcaagcagaaacttagattaaattctgaagagggagcagataactttatagattatataaaggtacaaaaacaggatatcgtcaaacttactgtatacgattgcatatctatgataggattgtgtgcatgcgtggtagatgtttggagaaatgagaaactgttttctagatggaaatattgtttacgagcgattaaactgtttattgatgatcacatgcttgataagataaaatctatactgcagaatagactagtatatgtggaaatgtcatagaaagttaaaagttaatgagagcaaaaatatataaggttgtattccatatttgttatttttttctgtaatagttagaaaaatacattcgatggtctatctatcagattattatgtgttataaggtactttttctcataataaactagagtatgagtaagatagtgtttttcaaaacatataaatctaaaattgatggatgagatatacagctattaatttcgaaaatatattttaatctgataactttaaacatggatttttaatggtggtttaacgttttaaaaaaagattttgttattgtagtatatgataatattaaaagatggatataaagaatttgctgactgcatgtactattttttacattactacattggctacggcagatatacctacttcgtcactgccacacgctccggtaaacggggcatgtgacgagggagaatatcttgataagaggcataatcaatgttgtaatcagtgtccacctggagaatttgccaaggttagatgtaatggtaacgataacacaaaatgtgaacgctgcccacctcatacatataccgcaatccccaattactctaatggatgtcatcaatgtagaaaatgcccaacaggatcatttgataaggtaaagtgtaccggaacacagaacagtaaatgttcgtgtcttcctggttggtattgcgctactgattcttcacagactgaagattgtcgagattgtataccaaaaaggagatgtccatgcggatactttggtggaatagatgaacaaggaaatcctatttgtaaatcgtgttgtgttggtgaatattgcgactacctacgtaattatagacttgatccatttcctccatgcaaactatctaaatgtaattaattatgattttgatgataatgttaccatacattatatcgctacttggttagtgtattattcagtatgaagacctattaataattacttatcttttgacgatcttgttataattataatataaaaatacttatggcatagtaactcataattgctgacgcgataaattcgtaataatctgttttgttcaaatttttataaggaatctacaggcataaaaataaaaatataatttataatatactcttacagcgcgccatcatgaataacagcagtgaattgattgctgttattaatggatttagaaatagtggacgattttgtgatattaatatagttattaatgatgaaaggataaacgctcacagactcatcctatctggagcctccgaatatttttccattctgttttccaataattttatcgattctaatgaatacgaagttaatctaagtcatttagattatcaaagtgttaacgatttgatcgattacatttatgggatacctttgagcctaactaacgataacgtgaaatatattctttcaaccgctgattttttacaaattggatctgctattacggagtgtgaaaattacatacttaaaaatctttgttctagaaactgtatcgatttctacatatacgctgataaatataataacaagaaaatagaatcagcgtcgtttaacacaatattacaaaatattttgagactcatcaacgatgaaaactttaaatacttaacagaggaatcaatgataaaaattttaagcgatgatatgttaaatataaaaaatgaggatttcgccccactaattctcattaaatggttagagagtactcaacaaccatgcaccgtcgagttacttaaatgcctcagaatatcattgctttccccacaagttataaaatcactttatagtcatcgactggttagttcaatctacgaatgtataacattcttaaacaatatagcattcttggatgaatcatttcctagataccatagcatcgagttgatatctatcggtataagtaattcgcatgataagatttccataaactgctacaatcataaaaaaaatacatgggaaatgatatcttcacgtagatataggtgtagtttcgcagtggccgtcctggataatattatctatatgatgggtggatatgatcagtccccgtatagaagttcaaaggttatagcgtacaatacatgtacaaattcttggatatatgatataccagagctaaaatatcctcgttctaattgtgggggactggctgatgacgaatacatttattgtataggcggcatacgcgatcaggattcatcgttgacatctagtattgatagatggaagccatcaaaaccatattggcagaagtatgctaaaatgcgcgaaccaaaatgtgatatgggggttgcgatgttaaacggattaatatatgttataggtggaatcgttaaaggtgacacgtgtaccgacgcactagagagtttatcagaagatggatggatgaagcatcaacgtcttccaataaaaatgtccaatatgtcgacgattgttcatgatggcaagatttatatatctggaggttacaacaatagtagtgtagttaatgtaatatcgaatctagtccttagctataattcgatatatgatgaatggaccaaattatcatcattaaacattcctagaattaatcccgctctatggtcagcgcataataaattatatgtaggaggaggaatatctgatgatgttcgaactaatacatctgagacatacgacaaagaaaaagattgttggacattggataatggtcacgtgttaccacgcaattatataatgtataaatgcgaaccgattaaacataaatatccattggaaaaaacacagtacacgaatgattttctaaagtatttggaaagttttataggtagttgatagaacaaaatacataattttgtaaaaataaatcactttttatactaatatgacacgattaccaatacttttgttactaatatcattagtatacgctacaccttttcctcagacatctaaaaaaataggtgatgatgcaactctatcatgtaatcgaaataatacaaatgactacgttgttatgagtgcttggtataaggagcccaattccattattcttttagctgctaaaagcgacgtcttgtattttgataattataccaaggataaaatatcttacgactctccatacgatgatctagttacaactatcacaattaaatcattgactgctagagatgccggtacttatgtatgtgcattctttatgacatcaactacaaatgacactgataaagtagattatgaagaatactccacagagttgattgtaaatacagatagtgaatcgactatagacataatactatctggatctacacattcaccggaaactagttctaagaaacctgattatatagataattctaattgctcgtcggtattcgaaatcggtacccggggatcagcttgcatgcctgcagcaattcccgaggctgtagccgacgatggtgcgccaggagagttgttgattcattgtttgcctccctgctgcggtttttcaccgaagttcatgccagtccagcgtttttgcagcagaaaagccgccgacttcggtttgcggtcgcgagtgaagatccctttcttgttaccgccaacgcgcaatatgccttgcgaggtcgcaaaatcggcgaaattccatacctgttcaccgacgacggcgctgacgcgatcaaagacgcggtgatacatatccagccatgcacactgatactcttcactccacatgtcggtgtacattgagtgcagcccggctaacgtatccacgccgtattcggtgatgataatcggctgatgcagtttctcctgccaggccagaagttctttttccagtaccttctctgccgtttccaaatcgccgctttggacataccatccgtaataacggttcaggcacagcacatcaaagagatcgctgatggtatcggtgtgagcgtcgcagaacattacattgacgcaggtgatcggacgcgtcgggtcgagtttacgcgttgcttccgccagtggcgcgaaatattcccgtgcaccttgcggacgggtatccggttcgttggcaatactccacatcaccacgcttgggtggtttttgtcacgcgctatcagctctttaatcgcctgtaagtgcgcttgctgagtttccccgttgactgcctcttcgctgtacagttctttcggcttgttgcccgcttcgaaaccaatgcctaaagagaggttaaagccgacagcagcagtttcatcaatcaccacgatgccatgttcatctgcccagtcgagcatctcttcagcgtaagggtaatgcgaggtacggtaggagttggccccaatccagtccattaatgcgtggtcgtgcaccatcagcacgttatcgaatcctttgccacgcaagtccgcatcttcatgacgaccaaagccagtaaagtagaacggtttgtggttaatcaggaactgttcgcccttcactgccactgaccggatgccgacgcgaagcgggtagatatcacactctgtctggcttttggctgtgacgcacagttcatagagataaccttcacccggttgccagaggtgcggattcaccacttgcaaagtcccgctagtgccttgtccagttgcaaccacctgttgatccgcatcacgcagttcaacgctgacatcaccattggccaccacctgccagtcaacagacgcgtggttacagtcttgcgcgacatgcgtcaccacggtgatatcgtccacccaggtgttcggcgtggtgtagagcattacgctgcgatggattccggcatagttaaagaaatcatggaagtaagactgctttttcttgccgttttcgtcggtaatcaccattcccggcgggatagtctgccagttcagttcgttgttcacacaaacggtgatacgtacacttttcccggcaataacatacggcgtgacatcggcttcaaatggcgtatagccgccctgatgctccatcacttcctgattattgacccacactttgccgtaatgagtgaccgcatcgaaacgcagcacgatacgctggcctgcccaacctttcggtataaagacttcgcgctgataccagacgttgcccgcataattacgaatatctgcatcggcgaactgatcgttaaaactgcctggcacagcaattgcccggctttcttgtaacgcgctttcccaccaacgctgatcaattccacagttttcgcgatccagactgaatgcccacaggccgtcgagttttttgatttcacgggttggggtttctacaggacgtaacattctagtcgaggaattcatttatagcatagaaaaaaacaaaatgaaattctactatatttttacatacatatattctaaatatgaaagtggtgattgtgactagcgtagcatcgcttctagacatctatatactatatagtaataccaatactcaagactacgaaactgatacaatctcttatcatgtgggtaatgttctcgatgtcgatagccatatgcccggtagttgcgatatacataaactgatcactaattccaaacccacccgctttttatagtaagtttttcacccataaataataaatacaataattaatttctcgtaaaagtagaaaatatattctaatttattgcacggtaaggaagtagaatcataaagaacagtgacggatccccgatccccgacctgcaggcatgcaagctcgactccggaaccaattactgataatgtagaagatcatacagacaccgtcacatacactagtgatagcattaatacagtaagtgcatcatctggagaatccacaacagacgagactccggaaccaattactgataaagaagatcatacagttacagacactgtctcatacactacagtaagtacatcatctggaattgtcactactaaatcaaccaccgatgatgcggatctttatgatacgtacaatgataatgatacagtaccaccaactactgtaggcggtagtacaacctctattagcaattataaaaccaaggactttgtagaaatatttggtattaccgcattaattatattgtcggccgtggcaattttctgtattacatattatatatataataaacgttcacgtaaatacaaaacagagaacaaagtctagatttttgacttacataaatgtctgggatagtaaaatctatcatattgagcggaccatctggtttaggaaagacagccatagccaaaagactatgggaatatatttggatttgtggtgtcccataccactagatttcctcgtcctatggaacgagaaggtgttgattaccattacgttaacagagaggccatctggaagggaatagccgccggaaactttctagaacatactgagtttttaggaaatatttacggaacttctaaaacagctgtgaatacagcggctattaataatcgtatttgtgtgatggatctaaacatcgacggtgttagaagtcttaaaaatacgtacctaatgccttactcggtgtatataagacctacctctcttaaaatggttgagaccaagcttcgtcgtagaaacactgaagctaacgatgagattcatcgtcgtgtgatgttggcaaaaactgacatggatgaggcaggtgaagccggtctattcgacactattatcattgaagatgatgtgaatttagcatatagtaagttaattcagatactacaggaccgtattagaatgtattttaacactaattagagacttaagacttaaaacttgataattaataatataactcgtttttatatgtgtctatttcaacgtctaatgtattagttaaatattaaaacttaccacgtaaaacttaaaatttaaaatgatatttcattgacagatagatcacacattatgaactttcaaggacttgtgttaactgacaattgcaaaaatcaatgggtcgttggaccattaataggaaaaggtggattcggtagtatttatactactaatgacaataattatgtagtaaaaatagagcccaaagctaacggatcattatttaccgaacaggcattttatactagagtacttaaaccatccgttatcgaagaatggaaaaaatctcacaatataaagcacgtaggtcttatcacgtgcaaggcatttggtctatacaaatccattaatgtggaatatcgattcttggtaattaatagattaggtgcagatctagatgcggtgatcagagccaataataatagactaccaaaaaggtcggtgatgttgatcggaatcgaaatcttaaataccatacaatttatgcacgagcaaggatattctcacggagatattaaagcgagtaatatagtcttagatcaaatagataagaataaattatatctagtggattacggattggtttctaaattcatgtctaatggcgaacatgttccatttataagaaatccaaataaaatggataacggtactctagaatttacacctatagattcgcataaaggatacgttgtatctagacgtggagatctagaaacacttggatattgtatgattagatggttgggaggtatcttaccatggactaagatatctgaaacaaagaattgtgcattagtaagtgccacaaaacagaaatatgttaacaatactgcgactttgttaatgaccagtttgcaatatgcacctagagaattgctgcaatatattaccatggtaaactctttgacatattttgaggaacccaattacgacaagtttcggcacatattaatgcagggtgtatattattaagtgtggtgtttggtcgataaaaattaaaaaataacttaatttattattgatctcgtgtgtacaaccgaaatcatggcgatgttttacgcacacgctctcggtgggtacgacgagaatcttcatgcctttcctggaatatcatcgactgttgccaatgatgtcaggaaatattctgttgtgtcagtttataataacaagtatgacattgtaaaagacaaatatatgtggtgttacagtcaggtgaacaagagatatattggagcactgctgcctatgtttgagtgcaatgaatatctacaaattggaaatccgatccatgatcaagaaggaaatcaaatctctatcatcacatatcgccacaaaaactactatgctctaagcggaatcgggtacgagagtctagacttgtgtttggaaggagtagggattcatcatcacgtacttgaaacaggaaacgctgtatatggaaaagttcaacatgattattctactatcaaagagaaggccaaagaaatgagtgcacttagtccaggacctatcatcgattaccacgtctggataggagattgtatctgtcaagttactgctgtggacgtacatggaaaggaaattatgaaaatgagattcaaaaagggtgcggtgcttccgatcccaaatctggtaaaagttaaacttggggagaatgatacagaaaatctttcttctactatatcggcggcaccatcgaggtaaccacctctctggaagacagcgtgaatcatgtactcatgaaacgtttggaaactatacgccatatgtggtctgttgtatatgatcattttgatattgtgaatggtaaagaatgctgttatgtgcatacgcattcatctaatcaaaatcctataccgagtactgtaaaaacaaatttgtacatgaagactatgggatcatgcattcaaatggattccatggaagctctagagtatcttagcgaactgaaggaatcaggtggatggagtcccagaccagaaatgcaggaatttgaatatccagatggagtggaagacactgaatcaattgagagattggcagaggagttcttcaatagatcagaacttcaggctggtgaatcagtcaaatttggtaattctattaattgttaaacatacatctgtttcagctaagcaactaagaacacgtatacggcagcagcttccttctatactctcatcttttaccaacacaaagggtggatatttgttcattggagttgataataatacacacaaagtatttggattcacggtgggttacgactacctcagactgatagagaatgatatagaaaagcatatcaaaagacttcgtgttgtgcatttctgtgagaagaaagaggacatcaagtacgcgtgtcgattcatcaaggtatataaacctggggatgagactacctcgacatacgtgtgcgctatcaaagtggaaagatgctgttgtgctgtgtttgcagattggccagaatcatggtatatggatactaatggtatcaagaagtattctccagatgaatgggtgtcacatataaaattttaattaatgtaactatagagaacaaataataaggttgtaatatcatatagacaataactaacaattaattagtaactgttatctcttttttaactaaccaactaactatatacctattaatacatcgtaattatagttcttaacatctattaatcattaattcgcttctttaattttttataaactaacattgttaattgaaaagggataacatgttacagaatataaattatatatggatttttttaaaaaggaaatacttgactggagtatatatttatctcttcattatatagcacgcgtgttttccaatttttccacatcccatataatacaggattataatctcgttcgaacatacgagaaagtggataaaacaatagttgattttttatctaggttgccaaatttattccatattttagaatatggggaaaatattctacatatttattctatggatgatgctaatacgaatattataattttttttctagatagagtattaaatattaataagaacgggtcatttatacacaatctcgggttatcatcatccattaatataaaagaatatgtatatcaattagttaataatgatcatccagataataggataagactaatgcttgaaaatggacgtagaacaagacattttttgtcctatatatcagatacagttaatatctatatatgtattttaataaatcatggattttatatagatgccgaagacagttacggttgtacattattacatagatgtatatatcactataagaaatcagaatcagaatcatacaatgaattaattaagatattgttaaataatggatcagatgtagataaaaaagatacgtacggaaacacaccttttatcctattatgtaaacacgatatcaacaacgtggaattgtttgagatatgtttagagaatgctaatatagactctgtagactttaatagatatacacctcttcattatgtctcatgtcgtaataaatatgattttgtaaagttattaatttctaaaggagcaaatgttaatgcgcgtaataaattcggaactactccattttattgtggaattatacacggtatctcgcttataaaactatatttggaatcagacacagagttagaaatagataatgaacatatagttcgtcatttaataatttttgatgctgttgaatctttagattatctattatccagaggagttattgatattaactatcgtactatatacaacgaaacatctatttacgacgctgtcagttataatgcgtataatacgttggtctatctattaaacaaaaatggtgattttgagacgattactactagtggatgtacatgtatttcggaagcagtcgcaaacaacaacaaaataataatggaagtactattgtctaaacgaccatctttgaaaattatgatacagtctatgatagcaattactaaacataaacagcataatgcagatttattgaaaatgtgtataaaatatactgcgtgtatgaccgattatgatactcttatagatgtacagtcgctacagcaatataaatggtatattttaagatgtttcgatgaaatagatatcatgaagagatgttatataaaaaataaaactgtattccaattagttttttgtatcaaagacattaatactttaatgagatacggtaaacatccttctttcgtgaaatgcactagtctcgacgtatacggaagtcgtgtacgtaatatcatagcatctattagatatcgtcagagattaattagtctattatccaagaagctggatcctggagataaatggtcgtgttttcctaacgaaataaaatataaaatattggaaaactttaacgataacgaactatccacatatctaaaaatcttataaacattattaaaatataaaatctaagtaggataaaatcacactacatcattgtttccttttagtgctcgacagtgtatactatttttaacgctcataaataaaaatgaaaacgatttccgttgttacgttgttatgcgtactacctgctgttgtttattcaacatgtactgtacccactatgaataacgctaaattaacgtctaccgaaacatcgtttaatgataaccagaaagttacgtttacatgtgatcagggatatcattctttggatccaaatgctgtctgtgaaacagataaatggaaatacgaaaatccatgcaaaaaaatgtgcacagtttctgattatgtctctgaactatataataaaccgctatacgaagtgaattccaccatgacactaagttgcaacggcgaaacaaaatattttcgttgcgaagaaaaaaatggaaatacttcttggaatgatactgttacgtgtcctaatgcggaatgtcaacctcttcaattagaacacggatcgtgtcaaccagttaaagaaaaatactcatttggggaatatatgactatcaactgtgatgttggatatgaggttattggtgcttcgtacataagttgtacagctaattcttggaatgttattccatcatgtcaacaaaaatgtgatatgccgtctctatctaacggattaatttccggatctacattttctatcggtggcgttatacatcttagttgtaaaagtggttttacactaacggggtctccatcatccacatgtatcgacggtaaatggaatcccatactcccaatatgtgtacgaactaacgaaaaatttgatccagtggatgatggtcccgacgatgagacagatttgagcaaactctcgaaagacgttgtacaatatgaacaagaaatagaatcgttagaagcaacttatcatataatcatagtggcgttgacaattatgggcgtcatatttttaatctccgttatagtattagtttgttcctgtgacaaaaataatgaccaatataagttccataaattgctaccgtaaatataaatccgttaaaataattaataatttaataacaaacaagtatcaaaagattaaagacttatagctagaatcaattgagatgtcttcttcagtggatgttgatatctacgatgccgttagagcatttttactcaggcactattataacaagagatttattgtgtatggaagaagtaacgccatattacataatatatacaggctatttacaagatgcgccgttataccgttcgatgatatagtacgtactatgccaaatgaatcacgtgttaaacaatgggtgatggatacacttaatggtataatgatgaatgaacgcgatgtttctgtaagcgttggcaccggaatactattcatggaaatgtttttcgattacaataaaaatagtatcaacaatcaactaatgtatgatataattaatagcgtatctataattctagctaatgagagatatagaagcgcttttaacgacgatggtatatacatccgtagaaatatgattaacaagttgtacggatacgcatctctaactactattggcacgatcgctggaggtgtttgttattatctgttgatgcatctagttagtttgtataaataattatttcaatatactagttaaaattttaagattttaaatgtataaaaaactaataacgtttttatttgtaataggtgcattagcatcctattcgaataatgagtacactccgtttaataaactgagtgtaaaactctatatagatggagtagataatatagaaaattcatatactgatgataataatgaattggtgttaaattttaaagagtacacaatttctattattacagagtcatgcgacgtcggatttgattccatagatatagatgttataaacgactataaaattattgatatgtataccattgactcgtctactattcaacgcagaggtcacacgtgtagaatatctaccaaattatcatgccattatgataagtacccttatattcacaaatatgatggtgatgagcgacaatattctattactgcagagggaaaatgctataaaggaataaaatatgaaataagtatgatcaacgatgatactctattgagaaaacatactcttaaaattggatctacttatatatttgatcgtcatggacatagtaatacatattattcaaaatatgatttttaaaaatttaaaatatattatcacttcagtgacagtagtcaaataacaaacaacaccatgagatatattataattctcgcagttttgttcattaatagtatacatgctaaaataactagttataagtttgaatccgtcaattttgattccaaaattgaatggactggggatggtctatacaatatatcccttaaaaattatggcatcaagacgtggcaaacaatgtatacaaatgtaccagaaggaacatacgacatatccgcatttccaaagaatgatttcgtatctttctgggttaaatttgaacaaggcgattataaagtggaagagtattgtacgggactatgcgtcgaagtaaaaattggaccaccgactgtaacattgactgaatacgacgaccatatcaatttgtacatcgagcatccgtatgctactagaggtagcaaaaagattcctatttacaaacgcggtgacatgtgtgatatctacttgttgtatacggctaacttcacattcggagattctaaagaaccagtaccatatgatatcgatgactacgattgcacgtctacaggttgcagcatagactttgtcacaacagaaaaagtgtgcgtgacagcacagggagccacagaagggtttctcgaaaaaattactccatggagttcgaaagtatgtctgacacctaaaaagagtgtatatacatgcgcaattagatccaaagaagatgttcccaatttcaaggacaaaatggccagagttatcaagagaaaatttaatacacagtctcaatcttatttaactaaatttctcggtagcacatcaaatgatgttaccacttttcttagcatgcttaacttgactaaatattcataactaatttttattaatgatacaaaaacgaaataaaactgcatattatacactggttaacgcccttataggctctaaccattttcaagatgaggtccctgattatagtccttctgttcccctctatcatctactccatgtctattagacgatgtgagaagactgaagaggaaacatggggattgaaaatagggttgtgtataattgccaaagatttctatcccgaaagaactgattgcagtgttcatctcccaactgcaagtgaaggattgataactgaaggcaatggattcagggatatacgaaacaccgataaattataaaaaaagcaatgtgtccgctgtttccgttaataatactattttcgtaactggcggattattcataaataactctaatagcacgatcgtggttaacaatatggaaaaacttgacatttataaagacaaacaatggtcgattatagaaatgcctatggctagggtatatcacggcattgactcgacatttggaatgttatattttgccggaggtctatccgttaccgaacaatatggtaatttagagaaaaacaacgagatatcttgttacaatcctagaacgaataagtggtttgatatttcatatactatttataagatatccatatcatcattgtgtaaactaaataacgtcttctatgtatttagtaaggacattggatatgtggaaaagtatgatggtgcatggaagttagtacatgatcgtctccccgctataaaggcattatcaacttctccttattgattgaaaatgaaaatataaatagtttttatgtatagcagtattaccctatagttttattgcttactactaacatggatacagatgttacaaatgtagaagatatcataaatgaaatagatagagagaaagaagaaatactaaaaaatgtagaaattgaaaataataaaaacattaacaagaatcatcccaatgaatatattagagaagcactcgttattaataccagtagtaatagtgattccattgataaagaagttatagaatgtatcagtcacgatgtaggaatatagatcatatctactaatttttataatcgatacaaaacataaaaaacaactcgttattacatagcaggcatggaatccttcaagtattgttttgataacgatggcaagaaatggattatcggaaatactttatattctggtaattcaatactctataaggtcagaaaaaatttcactagttcgttctacaattacgtaatgaagatagatcacaaatcacacaagccattgttgtctgaaatacgattctatatatctgtattggatcctttgactatcgacaactggacacgggaacgtggtataaagtatttggctattccagatctgtatggaattggagaaaccgatgattatatgttcttcgttataaagaattcgggaagagtattcgccccaaaggatactgaatcagtcttcgaagcatgcgtcactatgataaacacgttagagtttatacactctcgaggatttacccatggaaaaatagaaccgaggaatatactgattagaaataaacgtctttcactaattgactattctagaactaacaaactatacaagagtggaaactcacatatagattacaacgaggacatgataacttcaggaaatatcaattatatgtgtgtagacaatcatcttggagcaacagtttcaagacgaggagatttagaaatgttgggatattgcatgatagaatggttcggtggcaaacttccatggaaaaacgaaagtagtataaaagtaataaaacaaaaaaaagaatataaaaaatttatagctactttctttgaggactgttttcctgaaggaaatgaacctctggaattagttagatatatagaattagtatacacgttagattattctcaaactcctaattatgacagactacgtaaactgtttatacaagattgaaattatattcttttttttatagagtgtggtagtgttacggatatctaatattaatattagactatctctatcgcgctacacgaccaatatcgattactatggatatcttctatgaaaggagagaatgtatttatttctccagcgtcaatctcgtcagtattgacaatactgtattatggagctaatggatccactgctgaacagctatcaaaatatgtagaaacggaggagaacacggataaggttagcgctcagaatatctcattcaaatccatgaataaagtatatgggcgatattctgccgtgtttaaagattcctttttgagaaaaattggcgataagtttcaaactgttgacttcactgattgtcgcactatagatgcaatcaacaagtgtgtagatatctttactgaggggaaaatcaatccactattggatgaaccattgtctcctagcaattagtgccgtatactttaaagcaaaatggttgacgccattcgaaaaggaatttaccagtgattatcccttttacgtatctccgacggaaatggtagacgtaagtatgatgtctatgtacggcaaggcatttaatcacgcatctgtaaaagaatcattcggcaacttttcaatcatagaactgccatatgttggagatactagtatgatggtcattcttccagacaagattgatggattagaatccatagaacaaaatctaacagatacaaattttaagaaatggtgtgactttatggatgctatgtttatagatgttcacattcccaagtttaaggtaacaggctcgtataatctggtggatactctagtaaagtcaggactgacagaggtgttcggttcaactggagattatagcaatatgtgtaatttagatgtgagtgtcgacgctatgatccacaaaacgtatatagatgtcaatgaagagtatacagaagcagctgcagcaacttctgtactagtggcagactgtgcatcaacaattacaaatgagttctgtgcagatcatccgttcatctatgtgattaggcatgttgatggaaaaattcttttcgttggtagatattgctctccgacaactaattgttaaccattttttttaaaaaaaatagaaaaaacatgtggtattagtgcaggtcgttgttcttccaattgcaattggtaagatgacggccaactttagtacccacgtcttttcaccacagcactgtggatgtgacagactgaccagtattgatgacgtcaaacaatgtttgactgaatatatttattggtcgtcctatgcataccgcaacaggcaatgcgctggacaattgtattccacactcctctcttttagagatgatgcggaattagtgttcatcgacattcgcgagctggtaaaaaatatgccgtgggatgatgtcaaagattgtacagaaatcatccgttgttatataccggatgagcaaaaaaccatcagagagatttcggccatcatcggactttgtgcatatgctgctacttactggggaggtgaagaccatcccactagtaacagtctgaacgcattgtttgtgatgcttgagatgctaaattacgtggattataacatcatattccggcgtatgaattgatgagttgtacatcttgacattttctttcttctcttctccctttcttctcttctcccttcctccctcttctccctttcccagaaacaaacttttttacccactataaaataaaatgagtatactacctattatatttcttcctatatttttttattcttcattcgttcagacttttaacgcgtctgaatgtatcgacaaagggcaatattttgcatcattcatggagttagaaaacgagccagtaatcttaccatgtcctcaaataaatacgctatcatccggatataatatattagatattttatgggaaaaacgaggagcggataatgatagaattataccgatagataatggtagcaatatgctaattctgaacccgacacaatcagactctggtatttatatatgcattaccacgaacgaaacctactgtgacatgatgtcgttaaatttgacaatcgtgtctgtctcagaatcaaatatagatcttatctcgtatccacaaatagtaaatgagagatctactggcgaaatggtatgtcccaatattaatgcatttattgctagtaacgtaaacgcagatattatatggagcggacatcgacgccttagaaataagagacttaaacaacggacacctggaattattaccatagaagatgttagaaaaaatgatgctggttattatacatgtgttttagaatatatatacggtggcaaaacatataacgtaaccagaattgtaaaattagaggtacgggatagaataataccttctactatgcaattaccagatggcattgtaacttcaataggtagtaatttgactattgcatgcagagtatcgttgagacctcccacaacggacaccgacgtcttttggataagtaatggtatgtattacgaagaagatgatggggacggaaacggtagaataagtgtagcaaataaaatctatatgaccgataagagacgtgttattacatcccggttaaacattaatcctgtcaaggaagaagatgctacaacgtttacgtgtatggcgtttactattcctagcatcagcaaaacagttactgttagtataacgtgaatgtatgttgttacatttccatgtcaattgagtttataagaatttttatacattatcttccaacaaacaattgacgaacgtattgctatgattaactcccacgatactatgcatattattaatcattaacttgcagactatacctagtgctattttgacatactcgtgttcttgtgtaattgcggtatctatattattaaagtacgtaaatctagctatagttttattatttaattttagataatataccgtctccttatttttaaaaattgccacatcctttattaaatcatgaatgggaatttctatgtcatcgttagtatattgtgaacaacaagagcagatatctataggaaagggtggaatgcgatacattgatctatgtagttttaaaacacacgcgaactttgaagaatttatataaatcattccatcgatacatccttctatgttgacatgtatatatccaggaattcttttattaatgtcaggaaatgtataaactaaaacattgcccgaaagcggtgcctctatctgcgttatatccgttcttaacttacaaaatgtaaccaatacctttgcatgacttgttttgttcggcaacgttagtttaaacttgacgaatggattaattacaatagcatgatccgcgcatctattaagtttttttactttaacgcccttgtatgtttttacagagactttatctaaatttctagtgcttgtatgtgttataaatataacgggatatagaaccgaatcacctaccttagatacccaattacattttatcagatccagataataaacaaattttgtcgccctaactaattctatattgttatatattttacaattggttatgatatcatgtaataacttggagtctaacgcgcatcgtcgtacgtttatacaattgtgatttagtgtagtatatctacacatgtatttttccgcactatagtattctggactagtgataaaactatcgttatatctgtcttcaatgaactcatcgagatattgctctctgtcatattcatacacctgcataaactttctagacatcttacaatccgtgttattttaggatcatatttacatatttacgggtatatcaaagatgttagattagttaatgggaatcgtctataataatgaatattaaacaattatatgaggacttttaccacaaagcatcataaaaatgagtcgtcgtctgatttatgttttaaatatcaaccgcaaatcaactcataaaatacaagagaatgaaatatatacatattttagtcattgcaatatagaccatacttctacagaacttgattttgtagttaaaaactatgatctaaacagacgacaacctgtaactgggtatactgcactacactgctatttgtataataattactttacaaacgatgtactgaagatattattaaatcatgacgtaaatgtaacgatgaaaaccagtagcggacgtatgcctgtttatatattgcttactagatgttgtaatatttcacatgatgtagtgatagatatgatagacaaagataaaaaccacttattacatagagactattccaacctattactagagtatataaaatctcgttacatgttattgaaggaagaggatatcgatgagaacatagtatccactttattagataagggaatcgatcctaactttaaacaagacggatatacagcgttacattattattatttgtgtctcgcacacgtttataaactaggtgagtgtagaaaaccgataacgataaaaaaggccaagcgaattatttctttgtttatacaacatggagctaatctaaacgcgttagataattgtggtaatacaccattccatttgtatcttagtattgaaatgtgtaataatattcatatgactaaaatgctgttgacttttaatccgaatttcaaaatatgtaataatcatggattaacgcctatactatgttatataacttccgactacatacaacacgatattcttgttatgttaatacatcactatgaaacaaatgttggagaaatgccgatagatgagcgtcgtatgatcgtattcgagtttatcaaaacatattctacacgtccggcagattcgataacttatttgatgaataggtttaaaaatataaatatttatacccgctatgaaggaaagacattattacacgtagcatgtgaatataataatacacaagtaatagattatcttatacgtatcaacggagatataaatgcgttaaccgacaataacaaacacgctacacaactcattatagataacaaagaaaattccccatataccattaattgtttactgtatatacttagatatattgtagataagaatgtgataagatcgttggtggatcaacttccatctctacctatcttcgatataaaatcatttgagaaattcatatcctactgtatacttttagatgacacattttacgataggcacgttaagaatcgcgattctaaaacgtatcgatacgcattttcaaaatacatgtcgtttgataaatacgatggtataataactaaatgtcacgacgaaacaatgttactcaaactgtccactgttctagacactacactatatgcagttttaagatgtcataattcgagaaagttaagaagatacctcaacgagttaaaaaaatataataacgataagtcctttaaaatatattctaatattatgaatgagagataccttaatgtatattataaagatatgtacgtgtcaaaggtatatgataaactatttcctgttttcacagataaaaattgtctactaacattactaccttcagaaattatatacgaaatattatacatgctgacaattaacgatctttataatatatcgtatccacctaccaaagtatagttgtatttttctcatgcgatgtgtgtaaaaaaactgatattatataaatattttagtgccgtataataaagatgacgatgaaaatgatggtacatatatatttcgtatcattattgttattgctattccacagttacgccatagacatcgaaaatgaaatcacagaattcttcaataaaatgagagatactctaccagctaaagactctaaatggttgaatccagcatgtatgttcggaggcacaatgaatgatatagccgctctaggagagccattcagcgcaaagtgtcctcctattgaagacagtcttttatcgcacagatataaagactatgtggttaaatgggagaggctagaaaagaatagacggcgacaggtttctaataaacgtgttaaacatggtgatttatggatagccaactatacatctaaattcagtaaccgtaggtatttgtgcaccgtaactacaaagaatggtgactgtgttcagggtatagttagatctcatattaaaaaacctccttcatgcattccaaaaacatatgaactaggtactcatgataagtatggcatagacttatactgtggaattctttacgcaaaacattataataatataacttggtataaagataataaggaaattaatatcgacgacattaagtattcacaaacgggaaaggaattaattattcataatccagagttagaagatagcggaagatacgactgttacgttcattacgacgacgttagaatcaagaatgatatcgtagtatcaagatgtaaaatacttacggttataccgtcacaagaccacaggtttaaactaatactagatccgaaaatcaacgtaacgataggagaacctgccaatataacatgcactgctgtgtcaacgtcattattgatcgacgatgtactgattgaatgggaaaatccatccggatggcttataggattcgattttgatgtatactctgttttaactagtagaggcggtatcaccgaggcgaccttgtactttgaaaatgttactgaagaatatataggtaatacatataaatgtcgtggacacaactattattttgaaaaaacccttacaactacagtagtattggagtaaatatacaatgcatttttatatacattactgaattattattactgaattattattactgaattattattaattatatcgtatttgtgctatagaatggatgaagatacgcgactatctaggtatttgtatctcaccgatagagaacatataaatgtagactctattaaacagttgtgtaaaatatcagatcctaatgcatgttatagatgtggatgtacggctttacatgagtacttttataattatagatcagtcaacggaaaatacaagtatagatacaacggttactatcaatattattcatctagcgattatgaaaattataatgaatattattatgatagaactggtatgaacagtgagagtgataatatatcaatcaaaacagaatatgaattctatgatgaaacacaagatcaaagtacacaactagtaggttacgacattaaactcaaaaccaatgaggatgattttatggctatgatagatcagtgggtgtccatgattatatagatgaatcaattaataaagtagtatatggaagagagtctcacgtaagatggcgggatatatggcaagaacataatgatggcgtatacagtataggaaaggagtgcatagataatatatacgaagacaaccataccgtagacgaattctacaagatagacagcgtatcagatgtagatgacgcggaacacatatctccgataactaaaaaaccatagaatcagttgatgataatacctacatttctaatcttccgtataccatcaaatacaaaatattcgagcaacaataagtattttttatacctttaaaactgataaataaattttttctagtgatattttggcaagatgagaatcctatttctcatcgctttcatgtatgggtgtgttcactcatatgttaacgcggttgaaaccaaatgtccaaatctagacattgtaacatcttctggagaatttcattgttcaggatgtgtggaacatatgcctgagtttagctatatgtattggttggcaaaggatatgaaatcggacgaggataccaagtttatagaacatctgggtgatggcatcaaagaagatgaaaccgttcgtaccacagatagtggaatcgtcactctacgtaaagtccttcatgtgactgatactaataaatttgataattataggttcacttgtgtcctcgctacgctagatggcatttataaaaagaatgtttgctgaagtagttgtgtgctactatttttatttatgatataatctaatggaattaatttgaattgatatttatccaatactaaagattatattagaatcaaattaatcttttatacgagaaaaaataacgacatacgtcgtcaacaaattaaactttttatttattagttaactagcttatagaacttgctcattgttatgtttctaaaacgggtacggcatataggacaattatccgacgcaccggtttctcttcgtgttctatgccatatattgatgcatgttatgcaaaatatatgagtacacgaatccaataaaccaaagtatctatcgttttgagtaaacaacttcatagcaaattccacattctttttctttacttactctatacacgtcctcgtatttatttagtattttgatgatatccaactcagaaatggttgttgtattattgggtgtatttggagtataggtattattagctatgtaccaatttaccaaccctcttaatattgattgataatcacatcggttatccaattaataactaaattgtagtgtatatatagaccatatatgtttctatttttttgacagttacgtatagtttcagtaagttttgattgttgtattcctgtatctctagataagttagtcatatagtcccttccggcgatacgttttttccaagcccgaaattgattagccaaatgtgtatttatttttgtgatattgatataatatttcggataatgcatactgttagtcttatatcatttggttcatctatgtattgtaatattgttacatgatctatagatgatgtattgattttggcaggatcgaattccatatccgcgactaaacagtgaaaaaaatgtaaatactttttaaattttaaattagtaaaacttttttttattttttatgattccaaaaatactgaatacaaagtcctaaattataaatatggagatcatactaccacaacttattattatgtatacaaggccggtgtaatagatagatatatataattctattacaccggcagacaattaccgaccggtatttgtcgttaccaacataccgtataatatgtaatatacaattccataacccattgacagttgttatacatcaaaattgcaattcttttgattacgatgttataagaatgtagttaattgatgtatgatgttaatgtgtcctctttcctcttataacatcgtaatcaaaaacttttttataatatatacctaataatgtgtcttaatagttctcgtgattcgtcaaacaatcattcttataaaatataataaagcaacgtaaaaacacataaaaataagcgtaactaataagacaatggatatttacgacgataaaggtctacagactattaaactgtttaataatgaatttgattgtataaggaatgacatcagagaattatttaaacatgtaactgattccgatagtatacaacttccgatggaagacaattctgatattatagaaaatatcagaaaaatactatatagacgattaaaaaatgtagaatgtgttgacatcgataacacaataacttttatgaaatacgatccaaatgatgataataagcgtacgtgttctaattgggtacccttaactaataactatatggaatattgtctagtaatatatttggaaacaccgatatgtggaggcaaaataaaattataccaccctacaggaaatataaagtcggataaggatattatgtttgcaaagactctagactttaaatcaacgaaagtgttaactggacgtaaaacaattgccgttctagacatatccgtttcatataatagatcaatgactactattcactacaacgacgacgttgatatagatatacatactgataaaaatggaaaagagttatgttattgttatataacaatagatgatcattacttggttgatgtggaaactataggagttatagtcaatagatctggaaaatgtctgttagtaaataaccatctaggtataggtatcgttaaagataaacgtataagcgatagttttggagatgtatgtatggatacaatatttgacttttctgaagcacgagagttattttcattaactaatgatgataacaggaatatagcatgggacactgataaactagacgatgatacagatatatggactcccgtcacagaagatgattacaaatttctttctagactagtattgtatgcaaaatctcaatcggatactgtatttgactattatgttcttactggtgatacggaaccacccactgtattcattttcaaggtaactagattttactttaatatgccgaaataaaaaatttttgtataatatctagaggtagaggtattgtttagataaatacaaataacatagatacatcgcatacttagcatttttataaatatacataagacatacactttatacatttttgtaaaaatactcataaaaaaatttataaaaattatggcacaaccatatcttgtataggtagtttagttcgtcgagtgaacctataaacagataatagacaacacataataatgcctactaatacaagcataataccgggagatgggatatatgacgttgtagtgtttgggttttctgaacgttgatagtctactaatactacatgctgacatctaatgcctgtataaccatgagagcatctacaatacataccgtcaatatctctagcgtggatacagtcaccgtgtaaacaatatccatctccctctggaccgcataatctgatagctggaatatctgttgtagcgtttgtaatttctggcaatgtcgtttcgatagcgttaccactatcggcgaatgatctgattatcatagcagcgaacaacaacatcagataatttatcaacatttttgatggattctgtgtttatgctgtttctcagtgtgtgtttatgacaagattgggaattttatattattaattcagtaatataaactaataatatattgttaattgtgtaaataatataaaaataacaatacaatattgaatgtgttgctgttaaaaatgtatgtgttaatataatagaataaaataaatgagtatgatcattttagataacgattgattttatcattaccgcttcattcttatattctttgcttacggaacctatatttagaaacatctactaacaattttttatgcttgcattattaatggtatgtaatatgattgattgtgtacgcaataccaatttgttaagtatgaatacggggtacaaacataaattgaaatttaacattatttatttatgatatatatcgttatcgttaggtctataccatggatatctttaaagaactaatcttaaaacaccctgatgaaaatgttttgatttctccagtttccattttatctactttatctattctaaatcatggagcagctggttctacagctgaacaactatcaaaatatatagagaatatgaatgagaatacacccgatgacaataatgatgacatggaggtagatattccgtattgtgcgacactagctaccgcaaataaaatatacggtagcgatagtatcgagttccacgcctccttcctacaaaaaataaaagacgattttcaaactgtaaactttaataatgctaaccaaacaaaggaactaatcaacgaatgggttaagacaatgacaaatggtaaaattaattccttattgactagtccgctatccattaatactcgtatgacagttgttagcgccgtccattttaaagcaatgtggaaatatccattttctaaacatcttacatatacagacaagttttatatttctaagaatatagttaccagcgttgatatgatggtgggtaccgagaataacttgcaatatgtacatattaatgaattattcggaggattctctattatcgatattccatacgagggaaactctagtatggtaattatactaccggacgacatagaaggtatatataacatagaaaaaaatataacagatgaaaaatttaaaaaatggtgtggtatgttatctactaaaagtatagacttgtatatgccaaagtttaaagtggaaatgacagaaccgtataatctggtaccgattttagaaaatttaggacttactaatatattcggatattatgcagattttagcaagatgtgtaatgaaactatcactgtagaaaaatttctacatacgacgtttatagatgttaatgaggagtatacagaagcatcggccgttacaggagtatttacgattaacttttcgatggtatatcgtacgaaggtctacataaaccatccattcatgtacatgattaaagacaccacaggacgtatactttttatagggaaatactgctatccgcaataaatataaacaaatagacttttataaagagtcttcaacgataagtatatcgacatactacttatgctgcgaaagattctgaacgagaacgactatctcaccctcttggatcatatccgcactgctaaatactaaatctccactacactttttatcatcttatgaggaatgattgccttcgtgaaataggaataattagcaccagaatagctatggattattgtggtagagagtgcactattctatgtcgtctactggatgaagatgtgacgtacaaaaaaataaaactagaaattgaaacgtgtcacaacttatcaaaacatatagatagacgaggaaacaatgcgctacattgttacgtctccaataaatgcgatacagacattaagattgttctctcgcggagtcgagagactttgtagaaacaacgaaggattaactccgctaggagtatacagtaagcatagatacgtaaaatctcagattgtgcatctactgatatccagctattcaaattcctctaacgaactcaagtcgaatataaatgatttcgatctgtattcggataatatcgacttacgtctgctaaaatacctaattgtggataaacggatacgtccgtccaagaatacgaattatgcaatcaatggtctcggattggtggatatatacgtaacgacgcctaatccgagaccagaagtattgctatggcttcttaaatcagaatgttacagcaccggttacgtatttcgtacctgtatgtacgacagtgatatgtgtaagaactctcttcattactatatatcgtctcatagagaatctcaatctctatccaaggatgtaattaaatgtttgatcgataacaatgtttccatccatggcagagacgaaggaggatctttacccatccaatactactggtctttctcaaccatagatatagagattgttaaattattattaataaaggatgtggacacgtgtagagtatacgacgtcagccctatattagaggcgtattatctaaacaagcgatttagagtaaccccatataatgtagacatggaaatcgttaatcttcttattgagagacgtcatactcttgtcgacgtaatgcgtagtattacttcgtacgattccagagaatataaccactacatcatcgataacattctaaagagatttagacaacaggatgaatccatcgtacaagccatactgataaactacttacattacggcgatatggtcgttcgatgcatgttagataacggacaacaactatcctctacacgactactttgttaataataatctcgtcgatgtaaacgtcgtaaggtttatcgtggaaaatatggacacgcggctgtaaatcacgtatcgaacaatggccgtctatgtatgtacggtctgatattatcgagatttaataattgcgggtatcactgttatgaaaccatactgatagatgtatttgatatactaagcaagtacatggatgatatagatatgatcgataactctactatattacgcggtcgatgtcaataatatacaatttgcaaagcggttattggaatatggagcgagtatcacgctcgataatcaatacggccatccagaaaagcagttacagaagagaaaacaaaacgaaatcgttgttctacaagatgtctctccctacgacgattactacgtaaaaaagatactagcctactgcctattaagggacgagtcattcgcggaactacatagtaaattctgtttaaacgaggactataaaagtgtatttatgaaaaatatatcattcgataagatagattccatcatcgtgacataagtcgcctcaaagagattcgaatctccgacaccgacctgtatacggtatcacagctatcttaaagccatacattcagacagtcacatttcatttcccatgtacgacgatctcatagaacagtgccatctatcgatggagcgtaaaagtaaactcgtcgacaaagcactcaataaattagagtctaccatcggtcaatctagactatcgtatttgcctccggaaattatgcgcaatatcatctaaacagtatgttgtacggaaagaaccattacaaatattatccatgatagaaagaaaatatctatatgattggagaagtaggaaacaggaacaagacaacgattactacattattaaatcatgaagtccgtattatactcgtatatattgtttctctcatgtataataataaacggaagagatatagcaccgcatgcaccatccgatggaaagtgtaaagacaacgaatacaaacgccataatttgtgtccgggaacatacgcttccagattatgcgatagcaagactaacacacgatgtacgccgtgtggttcgggtaccttcacatctcgcaataatcatttacccgcttgtctaagttgtaacggaagacgcgatcgtgtaacacgactcacaatagaatctgtgaatgctctcccggatattattgtcttctcaaaggatcatccggatgcaaggcatgtgtttcccaaacaaaatgtggaataggatacggagtatccggagacgtcatctgttctccgtgtggtctcggaacatattctcacaccgtctcttccgcagataaatgcgaacccgtacccagaaatacgtttaactatatcgatgtggaaattaacctgtatccagttaacgacacgtcgtgtactcggacgaccactaccggtctcagcgaatccatctcaacgtcggaactaactattactatgaatcataaagactgtaatcccgtatttcgtgatggatacttctccgttcttaataaggtagcgacttcaggtttctttacaggagaaaggtgtgcactctgaatttcgagattaaatgcaataacaaagattcttcctccaaacagttaacgaaagcaaagaatgatactatcatgccgcattcggagacagtaactctagtgggcgacatctatatactatatagtaataccaatactcaagactacgaaactgatacaatctcttatcatgtgggtaatgttctcgatgtcgatagccatatgcccggtagttgcgatatacataaactgatcactaattccaaacccacccactttttatagtaagtttttcacccataaataataaatacaataattaatttctcgtaaaagtagaaaatatattctaatttattgcacggtaaggaagtagaatcataaagaacagtactcaatcaatagcaattatgaaacaatatatcgtcctggcatgcatgtgcctggcggcagctgctatgcctgccagtcttcagcaatcatcctcatcctcctcctcgtgtacggaagaagaaaacaaacatcatatgggaatcgatgttattatcaaagtcacaaagcaagaccaaacaccgaccaatgataagatttgccaatccgtaacggaaattacagagtccgagtcagatccagatcccgaggtggaatcagaagatgattccacatcagtcgaggatgtagatcctcctaccacttattactccatcatcggtggaggtctgagaatgaactttggattcaccaaatgtcctcagattaaatccatctcagaatccgctgatggaaacacagtgaatgctagattgtccagcgtgtccccaggacaaggtaaggactctcccgcgatcactcatgaagaagctcttgctatgatcaaagactgtgaagtgtctatcgacatcagatgtagcgaagaagagaaagacagcgacatcaagacccatccagtactcgggtctaacatctctcataagaaagtgagttacgaagatatcatcggttcaacgatcgtcgatacaaaatgcgtcaagaatctagagtttagcgttcgtatcggagacatgtgcaaggaatcatctgaacttgaggtcaaggatggattcaagtatgtcgacggatcggcatctgaaggtgcaaccgatgatacttcactcatcgattcaacaaaactcaaagcgtgtgtctgaatcgataactctattcatctgaaattggatgagtagggttaatcgaacgattcaggcacaccacgaattaaaaaagtgtaccggacactatattccggtttgcaaaacaaaaatgttcttaactacattcacaaaaagttacctctcgcgacttcttctttttctgtctcaatagtgtgatacgattatgacactattcctattcctattcctatttcctttcagagtatcacaaaaatattaaacctctttctgatggtctcataaaaaaagttttacaaaaatatttttattctctttctctctttgatggtctcataaaaaaagttttacaaaaatatttttattctctttctctctttgatggtctcataaaaaaagttttacaaaaatatttttattctctttctctctttgatggtctcataaaaaaagttttacaaaaatatttttattctctttctctctttgatggtctcataaaaaaagttttacaaaaatatttttattctctttctctctttgatggtctcataaaaaaagttttacaaaaatatttttattctctttctctctttgatggtctcataaaaaaagttttacaaaaatatttttattctctttctctctttgatggtctcataaaaaaagttttacaaaaatatttttattctctttctctctttgatggtctcataaaaaaagttttacaaaaatatttttattctctttctctctttgatggtctcataaaaaaagttttacaaaaatatttttattctctttctctctttgatggtctcataaaaaaagttttacaaaaatatttttattctctttctctctttgatggtctcataaaaaaagttttacaaaaatatttttattctctttctctctttgatggtctcataaaaaagttttacaaaaatatttttattctctttctctctttgatggtctcataaaaaagttttacaaaaatatttttattctctttctctctttgatggtctcataaaaaaagttttacaaaaatatttttattctctttctctctttgatggtctcataa

SEQ ID NO: 215 - DNA, 195009 bp, Artificial Sequence
  GLV-1h461
ttatgagaccatcaaagagagaaagagaataaaaatatttttgtaaaactttttttatgagaccatcaaagagagaaagagaataaaaatatttttgtaaaacttttttatgagaccatcaaagagagaaagagaataaaaatatttttgtaaaacttttttatgagaccatcaaagagagaaagagaataaaaatatttttgtaaaactttttttatgagaccatcaaagagagaaagagaataaaaatatttttgtaaaactttttttatgagaccatcaaagagagaaagagaataaaaatatttttgtaaaactttttttatgagaccatcaaagagagaaagagaataaaaatatttttgtaaaactttttttatgagaccatcaaagagagaaagagaataaaaatatttttgtaaaactttttttatgagaccatcaaagagagaaagagaataaaaatatttttgtaaaactttttttatgagaccatcaaagagagaaagagaataaaaatatttttgtaaaactttttttatgagaccatcaaagagagaaagagaataaaaatatttttgtaaaactttttttatgagaccatcaaagagagaaagagaataaaaatatttttgtaaaactttttttatgagaccatcaaagagagaaagagaataaaaatatttttgtaaaactttttttatgagaccatcaaagagagaaagagaataaaaatatttttgtaaaactttttttatgagaccatcaaagagagaaagagaataaaaatatttttgtaaaactttttttatgagaccatcagaaagaggtttaatatttttgtgatactctgaaaggaaataggaataggaataggaatagtgtcataatcgtatcacactattgagacagaaaaagaagaagtcgcgagaggtaactttttgtgaatgtagttaagaacatttttgttttgcaaaccggaatatagtgtccggtacacttttttaattcgtggtgtgcctgaatcgttcgattaaccctactcatccaatttcagatgaatagagttatcgattcagacacacgctttgagttttgttgaatcgatgagtgaagtatcatcggttgcaccttcagatgccgatccgtcgacatacttgaatccatccttgacctcaagttcagatgattccttgcacatgtctccgatacgaacgctaaactctagattcttgacgcattttgtatcgacgatcgttgaaccgatgatatcttcgtaactcactttcttatgagagatgttagacccgagtactggatgggtcttgatgtcgctgtctttctcttcttcgctacatctgatgtcgatagacacttcacagtctttgatcatagcaagagcttcttcatgagtgatcgcgggagagtccttaccttgtcctggggacacgctggacaatctagcattcactgtgtttccatcagcggattctgagatggatttaatctgaggacatttggtgaatccaaagttcattctcagacctccaccgatgatggagtaataagtggtaggaggatctacatcctcgactgatgtggaatcatcttctgattccacctcgggatctggatctgactcggactctgtaatttccgttacggattggcaaatcttatcattggtcggtgtttggtcttgctttgtgactttgataataacatcgattcccatatgatgtttgttttcttcttccgtacacgaggaggaggatgaggatgattgctgaagactggcaggcatagcagctgccgccaggcacatgcatgccaggacgatatattgtttcataattgctattgattgagtactgttctttatgattctacttccttaccgtgcaataaattagaatatattttctacttttacgagaaattaattattgtatttattatttatgggtgaaaaacttactataaaaagtgggtgggtttggaattagtgatcagtttatgtatatcgcaactaccgggcatatggctatcgacatcgagaacattacccacatgataagagattgtatcagtttcgtagtcttgagtattggtattactatatagtatatagatgtcgcccactagagttactgtctccgaatgcggcatgatagtatcattctttgctttcgttaactgtttggaggaagaatctttgttattgcatttaatctcgaaattcagagtgcacacctttctcctgtaaagaaacctgaagtcgctaccttattaagaacggagaagtatccatcacgaaatacgggattacagtctttatgattcatagtaatagttagttccgacgttgagatggattcgctgagaccggtagtggtcgtccgagtacacgacgtgtcgttaactggatacaggttaatttccacatcgatatagttaaacgtatttctgggtacgggttcgcatttatctgcggaagagacggtgtgagaatatgttccgagaccacacggagaacagatgacgtctccggatactccgtatcctattccacattttgtttgggaaacacatgccttgcatccggatgatcctttgagaagacaataatatccgggagagcattcacagattctattgtgagtcgtgttacacgatcgcgtcttccgttacaacttagacaagcgggtaaatgattattgcgagatgtgaaggtacccgaaccacacggcgtacatcgtgtgttagtcttgctatcgcataatctggaagcgtatgttcccggacacaaattatggcgtttgtattcgttgtctttacactttccatcggatggtgcatgcggtgctatatctcttccgtttattattatacatgagagaaacaatatatacgagtataatacggacttcatgatttaataatgtagtaatcgttgtcttgttcctgtttcctacttctccaatcatatagatattttctttctatcatggataatatttgtaatggttctttccgtacaacatactgtttagatgatattgcgcataatttccggaggcaaatacgatagtctagattgaccgatggtagactctaatttattgagtgctttgtcgacgagtttacttttacgctccatcgatagatggcactgttctatgagatcgtcgtacatgggaaatgaaatgtgactgtctgaatgtatggctttaagatagctgtgataccgtatacaggtcggtgtcggagattcgaatctctttgaggcgacttatgtcacgatgatggaatctatcttatcgaatgatatatttttcataaatacacttttatagtcctcgtttaaacagaatttactatgtagttccgcgaatgactcgtcccttaataggcagtaggctagtatcttttttacgtagtaatcgtcgtagggagagacatcttgtagaacaacgatttcgttttgttttctcttctgtaactgcttttctggatggccgtattgattatcgagcgtgatactcgctccatattccaataaccgctttgcaaattgtatattattgacatcgaccgcgtaatatagtagagttatcgatcatatctatatcatccatgtacttgcttagtatatcaaatacatctatcagtatggtttcataacagtgatacccgcaattattaaatctcgataatatcagaccgtacatacatagacggccattgttcgatacgtgatttacagccgcgtgtccatattttccacgataaaccttacgacgtttacatcgacgagattattattaacaaagtagtcgtgtagaggatagttgttgtccgttatctaacatgcatcgaacgaccatatcgccgtaatgtaagtagtttatcagtatggcttgtacgatggattcatcctgttgtctaaatctctttagaatgttatcgatgatgtagtggttatattctctggaatcgtacgaagtaatactacgcattacgtcgacaagagtatgacgtctctcaataagaagattaacgatttccatgtctacattatatggggttactctaaatcgcttgtttagataatacgcctctaatatagggctgacgtcgtatactctacacgtgtccacatcctttattaataataatttaacaatctctatatctatggttgagaaagaccagtagtattggatgggtaaagatcctccttcgtctctgccatggatggaaacattgttatcgatcaaacatttaattacatccttggatagagattgagattctctatgagacgatatatagtaatgaagagagttcttacacatatcactgtcgtacatacaggtacgaaatacgtaaccggtgctgtaacattctgatttaagaagccatagcaatacttctggtctcggattaggcgtcgttacgtatatatccaccaatccgagaccattgattgcataattcgtattcttggacggacgtatccgtttatccacaattaggtattttagcagacgtaagtcgatattatccgaatacagatcgaaatcatttatattcgacttgagttcgttagaggaatttgaatagctggatatcagtagatgcacaatctgagattttacgtatctatgcttactgtatactcctagcggagttaatccttcgttgtttctacaaagtctctcgactccgcgagagaacaatcttaatgtctgtatcgcatttattggagacgtaacaatgtagcgcattgtttcctcgtctatctatatgttttgataagttgtgacacgtttcaatttctagttttatttttttgtacgtcacatcttcatccagtagacgacatagaatagtgcactctctaccacaataatccatagctattctggtgctaattattcctatttcacgaaggcaatcattcctcataagatgataaaaagtgtagtggagatttagtatttagcagtgcggatatgatccaagagggtgagatagtcgttctcgttcagaatctttcgcagcataagtagtatgtcgatatacttatcgttgaagactctttataaaagtctatttgtttatatttattgcggatagcagtatttccctataaaaagtatacgtcctgtggtgtctttaatcatgtacatgaatggatggtttatgtagaccttcgtacgatataccatcgaaaagttaatcgtaaatactcctgtaacggccgatgcttctgtatactcctcattaacatctataaacgtcgtatgtagaaatttttctacagtgatagtttcattacacatcttgctaaaatctgcataatatccgaatatattagtaagtcctaaattttctaaaatcggtaccagattatacggttctgtcatttccactttaaactttggcatatacaagtctatacttttagtagataacataccacaccattttttaaatttttcatctgttatatttttttctatgttatatataccttctatgtcgtccggtagtataattaccatactagagtttccctcgtatggaatatcgataatagagaatcctccgaataattcattaatatgtacatattgcaagttattctcggtacccaccatcatatcaacgctggtaactatattcttagaaatataaaacttgtctgtatatgtaagatgtttagaaaatggatatttccacattgctttaaaatggacggcgctaacaactgtcatacgagtattaatggatagcggactagtcaataaggaattaattttaccatttgtcattgtcttaacccattcgttgattagttcctttgtttggttagcattattaaagtttacagtttgaaaatcgtcttttattttttgtaggaaggaggcgtggaactcgatactatcgctaccgtatattttatttgcggtagctagtgtcgcacaatacggaatatctacctccatgtcatcattattgtcatcgggtgtattctcattcatattctctatatattttgatagttgttcagctgtagaaccagctgctccatgatttagaatagataaagtagataaaatggaaactggagaaatcaaaacattttcatcagggtgttttaagattagttctttaaagatatccatggtatagacctaacgataacgatatatatcataaataaataatgttaaatttcaatttatgtttgtaccccgtattcatacttaacaaattggtattgcgtacacaatcaatcatattacataccattaataatgcaagcataaaaaattgttagtagatgtttctaaatataggttccgtaagcaaagaatataagaatgaagcggtaatgataaaatcaatcgttatctaaaatgatcatactcatttattttattctattatattaacacatacatttttaacagcaacacattcaatattgtattgttatttttatattatttacacaattaacaatatattattagtttatattactgaattaataatataaaattcccaatcttgtcataaacacacactgagaaacagcataaacacagaatccatcaaaaatgttgataaattatctgatgttgttgttcgctgctatgataatcagatcattcgccgatagtggtaacgctatcgaaacgacattgccagaaattacaaacgctacaacagatattccagctatcagattatgcggtccagagggagatggatattgtttacacggtgactgtatccacgctagagatattgacggtatgtattgtagatgctctcatggttatacaggcattagatgtcagcatgtagtattagtagactatcaacgttcagaaaacccaaacactacaacgtcatatatcccatctcccggtattatgcttgtattagtaggcattattatgtgttgtctattatctgtttataggttcactcgacgaactaaactacctatacaagatatggttgtgccataatttttataaatttttttatgagtatttttacaaaaatgtataaagtgtatgtcttatgtatatttataaaaatgctaagtatgcgatgtatctatgttatttgtatttatctaaacaatacctctacctctagatattatacaaaaattttttatttcggcatattaaagtaaaatctagttaccttgaaaatgaatacagtgggtggttccgtatcaccagtaagaacataatagtcaaatacagtatccgattgagattttgcatacaatactagtctagaaagaaatttgtaatcatcttctgtgacgggagtccatatatctgtatcatcgtctagtttatcagtgtcccatgctatattcctgttatcatcattagttaatgaaaataactctcgtgcttcagaaaagtcaaatattgtatccatacatacatctccaaaactatcgcttatacgtttatctttaacgatacctatacctagatggttatttactaacagacattttccagatctattgactataactcctatagtttccacatcaaccaagtaatgatcatctattgttatataacaataacataactcttttccatttttatcagtatgtatatctatatcaacgtcgtcgttgtagtgaatagtagtcattgatctattatatgaaacggatatgtctagaacggcaattgttttacgtccagttaacactttcgttgatttaaagtctagagtctttgcaaacataatatccttatccgactttatatttcctgtagggtggtataattttattttgcctccacatatcggtgtttccaaatatattactagacaatattccatatagttattagttaagggtacccaattagaacacgtacgcttattatcatcatttggatcgtatttcataaaagttattgtgttatcgatgtcaacacattctacattttttaatcgtctatatagtatttttctgatattttctataatatcagaattgtcttccatcggaagttgtatactatcggaatcagttacatgtttaaataattctctgatgtcattccttatacaatcaaattcattattaaacagtttaatagtctgtagacctttatcgtcgtaaatatccattgtcttattagttacgcttatttttatgtgtttttacgttgctttattatattttataagaatgattgtttgacgaatcacgagaactattaagacacattattaggtatatattataaaaaagtttttgattacgatgttataagaggaaagaggacacattaacatcatacatcaattaactacattcttataacatcgtaatcaaaagaattgcaattttgatgtataacaactgtcaatgggttatggaattgtatattacatattatacggtatgttggtaacgacaaataccggtcggtaattgtctgccggtgtaatagaattatatatatctatctattacaccggccttgtatacataataataagttgtggtagtatgatctccatatttataatttaggactttgtattcagtatttttggaatcataaaaaataaaaaaaagttttactaatttaaaatttaaaaagtatttacatttttttcactgtttagtcgcggatatggaattcgatcctgccaaaatcaatacatcatctatagatcatgtaacaatattacaatacatagatgaaccaaatgatataagactaacagtatgcattatccgaaatattatatcaatatcacaaaaataaatacacatttggctaatcaatttcgggcttggaaaaaacgtatcgccggaagggactatatgactaacttatctagagatacaggaatacaacaatcaaaacttactgaaactatacgtaactgtcaaaaaaatagaaacatatatggtctatatatacactacaatttagttattaattggataaccgatgtgattatcaatcaatattaagagggttggtaaattggtacatagctaataatacctatactccaaatacacccaataatacaacaaccatttctgagttggatatcatcaaaatactaaataaatacgaggacgtgtatagagtaagtaaagaaaaagaatgtggaatttgctatgaagttgtttactcaaaacgatagatactttggtttattggattcgtgtactcatatattttgcataacatgcatcaatatatggcatagaacacgaagagaaaccggtgcgtcggataattgtcctatatgccgtacccgttttagaaacataacaatgagcaagttctataagctagttaactaataaataaaaagtttaatttgttgacgacgtatgtcgttattttttctcgtataaaagattaatttgattctaatataatctttagtattggataaatatcaattcaaattaattccattagattatatcataaataaaaatagtagcacacaactacttcagcaaacattctttttataaatgccatctagcgtagcgaggacacaagtgaacctataattatcaaatttattagtatcagtcacatgaaggactttacgtagagtgacgattccactatctgtggtacgaacggtttcatcttctttgatgccatcacccagatgttctataaacttggtatcctcgtccgatttcatatcctttgccaaccaatacatatagctaaactcaggcatatgttccacacatcctgaacaatgaaattctccagaagatgttacaatgtctagatttggacatttggtttcaaccgcgttaacatatgagtgaacacacccatacatgaaagcgatgagaaataggattctcatcttgccaaaatatcactagaaaaaatttatttatcagttttaaaggtataaaaaatacttattgttgctcgaatattttgtatttgatggtatacggaagattagaaatgtaggtattatcatcaactgattctatggttttatgtattctatcatgtttcactattgcgttggaaataatatcatatgcttccacatatattttattttgttttaactcataatactcacgtaattctggattattggcatatctatgaataattttagctccatgatcagtaaatattaatgagaacatagtattaccacctaccattatttttttcatctcattcaattcttaattgcaaagatctatataatcattatagcgttgacttatggactctggaatcttagacgatgtacagtcatctataatcatggcatatttaatacattgttttatagcatagtcgttatctacgatgttagatatttctctcaatgaatcaatcacacaatctaatgtaggtttatgacataatagcattttcagcagttcaatgtttttagattcgttgatggcaatggctatacatgtatatccgttatttgatctaatgttgacatctgaaccggattctagcagtaaagatactagagattgtttattatatctaacagccttgtgaagaagtgtttctcctcgtttgtcaatcatgttaatgtctttaagataaggtaggcaaatgtttatagtactaagaattgggcaagcataagacatgtcacaaagacccttttttgtatgtataagtgtaaaaattataacatccatagttggatttacataggtgtccaatcgggatctctccatcatcgagataattgatggcatctcccttccttttttagtagatatttcatcgtgtaagaatcaatattaatatttctaaagtatccgtgtatagcctctttatttaccacagctccatattccactagagggatatcgccgaatgtcatatactcaattagtatatgttggaggacatccgagttcattgttttcaatatcaaagagatggtttccttatcatttctccatagtggtacaatactacacattattccgtgcggctttccattttccaaaaacaatttgaccaaatctaaatctacatctttattgtatctataatcactatttagataatcagccataattcctcgagtgcaacatgttagatcgtctatatatgaataagcagtgttatctattcctttcattaacaatttaacgatgtctatatctatatgagatgacttaatataatattgaagagctgtacaatagtttttatctataaaagacggcttgattccgtgattaattagacatttaacaacttccggacgcacatatgctctcgtatccgactctgaatacagatgagagatgatatacagatgcaatacggtaccgcaatttcgtagttgataatcatcatacgcgtatcagtactcgtcctcataaagaacactgcagccattttctatgaacaaatcaataattttagaaacaggatcattgtcattacataattttctataactgaacgatggttttcacatttaacactcaagtcaaatccatgttctaccaacacctttatcaagtcaacgtctacatttttggatttcatatagctgaatatattaaagttatttatgttgctaaatccagtggcttctagtagagccatcgctatatccttattaactttaacatgtctactatttgtgtattcttctaatggggtaagctgtctccaatttttgcgtaatggattagtgccactgtctagtagtagtttgacgacctcgacattattacaatgctcattaaaaaggtatgcgtgtaaagcattattcttgaattggttcctggtatcattaggatctctgtctttcaacatctgtttaagttcatcaagagccacctcctcattttccaaatagtcaaacattttgactgaatgagctactgtgaactctatacacccacacaactaatgtcattaaatatcatgtcaaaaacttgtacaattattaataaaaataatttagtgtttaaattttaccagttccagattttacacctccgttaatacctccattaaccccactggacgatcctcctccccacattccaccgccaccagatgtataagttttagatcctttattactaccatcatgtccatggataaagacactccacatgccgccactaccccctttagaagacatattaataagacttaaggacaagtttaacaataaaattaatcacgagtaccctactaccaacctacactattatatgattatagtttctatttttacagtaccttgactaaagtttctagtcacaagagcaatactaccaacctacactattatatgattatagtttctatttttataggaacgcgtacgagaaaatcaaatgtctaatttctaacggtagtgttgataaacgattgttatccgcggatacctcctctatcatgtcgtctattttcttactttgttctattaacttattagcattatatattatttgattataaaacttatattgcttattagcccaatctgtaaatatcggattattaacatatcgtttctttgtaggtttatttaacatgtacatcactgtaagcatgtccttaccatttattttaatttgacgcatatccgcaatttctttttcgcagtcggttataaattctatatatgatggatacatgctacatgtgtacttataatcgactaatatgaagtacttgatacatattttcagtaacgatttattattaccacctatgaataagtacctgtgatcgtctaggtaatcaactgttttcttaatacattcgatggttggtaatttactcagaataatttccaatatcttaatatataattctgctatttctgggatatatttatctgccagtataacacaaatagtaatacatgtaaacccatattttgttattatattaatgtctgcgccattatctattaaccattctactaggctgacactatgcgactcaatacaatgataaagtatactacatccatgtttatctattttgtttatatcatcaatatacggcttacaaagttttagtatcgataacacatccaactcacgcatagagaaggtagggaataatggcataatatttattaggttatcatcattgtcattatctacaactaagtttccattttttaaaatatactcgacaactttaggatctctattgccaaatttttgaaaatatttatttatatgcttaaatctatataatgtagctccttcatcaatcatacatttaataacattgatgtatactgtatgataagatacatattctaacaatagatcttgtatagaatctgtatatcttttaagaattgtggatattaggatattattacataaactattacacaattctaaaatataaaacgtatcacggtcgaataatagttgatcaactatataattatcgattttgtgatttttcttcctaaactgtttacgtaaatagttagatagaatattcattagttcatgaccactatagttactatcgaataacgcgtcaaatatttcccgtttaatatcgcatttgtcaagataataatagagtgtggtatgttcacgataagtataataacgcatctctttttcgtgtgaaattaaatagtttattacgtccaaagatgtagcataaccatcttgtgacctagtaataatataataatagagaactgttttacccattctatcatcataatcagtggtgtagtcgtaatcgtaatcgtctaattcatcatcccaattataatattcaccagcacgtctaatctgttctattttgatcttgtatccatactgtatgttgctacatgtaggtattcctttatccaataatagtttaaacacatctacattgggatttgatgttgtagcgtatttttctacaatattaataccatttttgatactatttatttctatacctttcgaaattagtaatttcaataagtctatattgatgttatcagaacatagatattcgaatatatcaaaatcattgatatttttatagtcgactgacgacaataacaaaatcacaacatcgtttttgatattattatttttcttggtaacgtatgcctttaatggagtttcaccatcatactcatataatggatttgcaccactttctatcaatgattgtgcactgctggcatcgatgttaaatgttttacaactatcatagagtatcttatcgttaaccatgattggttgttgatgctatcgcattttttggtttctttcatttcagttatgtatggatttagcacgtttgggaagcatgagctcatatgatttcagtactgtagtgtcagtactattagtttcaataagatcaatctctagatctatagaatcaaaacacgataggtcagaagataatgaatatctgtaggcttcttgttgtactgtaacttctggttttgttagatggttgcatcgtgctttaacgtcaatggtacaaattttatcctcgctttgtgtatcatattcgtccctactataaaattgtatattcagattatcatgcgatgtgtatacgctaacggtatcaataaacggagcacaccatttagtcataaccgtaatccaaaaatttttaaagtatatcttaacgaaagaagttgtgtcattgtctacggtgtatggtactagatcctcataagtgtatatatctagagtaatgtttaatttattaaatggttgataatatggatcctcgtgacaatttccgaagatggaaataagacataaacacgcaataaatctaattgcggacatggttactccttaaaaaaatacgaataatcaccttggctatttagtaagtgtcatttaacactatactcatattaatccatggactcataatctctatacgggattaacggatgttctatatacggggatgagtagttctcttctttaactttatactttttactaatcatatttagactgatgtatgggtaatagtgtttgaagagctcgttctcatcatcagaataaatcaatatctctgtttttttgttatacagatgtattacagcctcatatattacgtaatagaacgtgtcatctaccttattaactttcaccgcatagttgtttgcaaatacggttaatcctttgacctcgtcgatttccgaccaatctgggcgtataatgaatctaaactttaattgcttgtaatcattcgaaataatttttagtttgcatccgtagttatcccctttatgtaactgtaaatttctcaacgcgatatctccattaataatgatgtcgaattcgtgctgtatacccatactgaatggatgaacgaataccgacggcgttaatagtaatttactttttcatctttacatattgggtactagttttactatcataagtttataaattccacaagctactatggaataagccaaccatcttagtataccacacatgtcttaaagtttattaattaattacatgttgttttatatatatcgctacgaatttaaagagaaattagtttaggaagaaaaattatctatctacatcatcacgtctctgtattctacgatagagtgctactttaagatgcgacagatccgtgtcatcaaatatatactccattaaaatgattattccggcagcgaacttgatattggatatatcacaacctttgttaatatctacgacaatagacagcagtcccatggttccataaacagtgagtttatctttctttgaagagatattttgtagagatcttataaaactgtcgaatgacatcgcatttatatctttagctaaatcgtatatgttaccatcgtaatatctaaccgcgtctatcttaaacgtttccatcgctttaaagacgtttccgatagatggtctcatttcatcagtcatactgagccaacaaatataatcgtgtataacatctttgatagaatcagactctaaagaaaacgaatcggctttattatacgcattcatgataaacttaatgaaaaatgtttttcgttgtttaagttggatgaatagtatgtcttaataattgttattatttcattaattaatatttagtaacgagtacactctataaaaacgagaatgacataactaatcataactagttatcaaagtgtctaggacgcgtaattttcatatggtatagatcctgtaagcattgtctgtattctggagctattttctctatcgcattagtgagttcagaatatgttataaatttaaatcgaataacgaacataactttagtaaagtcgtctatattaactcttttattttctagccatcgtaataccatgtttaagatagtatattctctagttactacgatctcatcgttgtctagaatatcacatactgaatctacatccaattttagaaattggtctgtgttacatatctcttctatattattgttgatgtattgtcgtagaaaactattacgtagaccattttctttataaaacgaatatatagtactccaattatctttaccgatatatttgcacacataatccattctctcaatcactacatctttaagattttcgttgttaagatatttggctaaactatataattctattagatcatcaacagaatcagtatatatttttctagatccaaagacgaactctttggcgtcctctataatattcccagaaaagatattttcgtgttttagtttatcgagatctgatctgttcatatacgccatgattgtacggtacgttatgataaccgcataaaataaaaatccattttcatttttaaccaatactattcataattgagattgatgtaatactttgttactttgaacgtaaagacagtacacggatccgtatctccaacaagcacgtagtaatcaaatttggtgttgttaaacttcgcaatattcatcaatttagatagaaacttatactcatcatctgttttaggaatccatgtattattaccactttccaacttatcattatcccaggctatgtttcgtccatcatcgttgcgcagagtgaataattcttttgtattcggtagttcaaatatatgatccatgcatagatcggcaaagctattgtagatgtgatttttcctaaatctaatataaaactcgtttactagcaaacactttcctgatttatcgaccaagacacatatggtttctaaatctatcaagtggtggggatccatagttatgacgcagtaacatatattattacattcttgactgtcgctaatatctaaatatttattgttatcgtattggattctgcatatagatggcttgtatgtcaaagatatagaacacataaccaatttatagtcgcgctttacattctcgaatctaaagttaagagatttagaaaacattatatcctcggatgatgttatcactgtttctggagtaggatatattaaagtctttacagatttcgtccgattcaaataaatcactaaataatatcccacattatcatctgttagagtagtatcattaaatctattatattttatgaaagatatatcactgctcacctctatatttcgtacatttttaaactgtttgtataatatctctctgatacaatcagatatatctattgtgtcggtagacgataccgttacatttgaattaatggtgttccattttacaacttttaacaagttgaccaattcatttctaatagtatcaaactctccatgattaaatattttaatagtatccattttatatcactacggacacaaagtagctgacataaaccattgtataatttttatgttttatgtttattagcgtacacattttggaagttccggcttccatgtatttcctggagagcaagtagatgatgaggaaccagatagtttatatccgtacttgcacttaaagtctacattgtcgttgtatgagtatgatcttttaaacccgctagacaagtatccgtttgatattgtaggatgtggacatttaacaatctgacacgtgggtggatcggaccattctcctcctgaacacaggacactagagttaccaatcaacgaatatccactattgcaactataagttacaacgctcccatcggtataaaaatcctcgtatccgttatgtcttccgttggatatagatggaggggattggcatttaacagattcacaaataggtgcctcgggattccataccatagatccagtagatcctaattcacaatacgatttagattcaccgatcaactgatatccgctattacaagagtacgttatactagagccaaagtctactccaccaatatcaagttggccattatcgatatctcgaggcgatgggcatctccgtttaatacattgattaaagagtgtccatccagtacctgtacatttagcatatataggtcccattttttgctttctgtatccaggtagacatagatattctatagtgtctcctatgttgtaattagcattagcatcagtctccacactattcttaaatttcatattaatgggtcgtgacggaatagtacagcatgatagaacgcatcctattcccaacaatgtcaggaacgtcacgctctccaccttcatatttatttatccgtaaaaatgttatcctggacatcgtacaaataataaaaagcccatatatgttcgctattgtagaaattgtttttcacagttgctcaaaaacgatggcagtgacttatgagttacgttacactttggagtctcatctttagtaaacatatcataatattcgatattacgagttgacatatcgaacaaattccaagtatttgattttggataatattcgtattttgcatctgctataattaagatataatcaccgcaagaacacacgaacatctttcctacatggttaaagtacatgtacaattctatccatttgtcttccttaactatatatttgtatagataattacgagtctcgtgagtaattccagtaattacatagatgtcgccgtcgtactctacagcataaactatactatgatgtctaggcatgggagacttttttatccaacgatttttagtgaaacattccacatcgtttaatactacatatttctcatacgtggtataaactccacccattacatatatatcatcgtttacgaataccgacgcgcctgaatatctaggagtaattaagtttggaagtcttatccatttcgaagtgccgtgtttcaaatattctgccacacccgttgaaatagaaaattctaatcctcctattacatataactttccatcgttaacacaagtactaacttctgattttaacgacgacatattagtaaccgttttccattttttcgttttaagatctacccgcgatacggaataaacatgtctattgttaatcatgccgccaataatgtatagacaattatgtaaaacatttgcattatagaattgtctatctgtattaccgactatcgtccaatattctgttctaggagagtaatgggttattgtggatatataatcagagtttttaatgactactatattatgttttataccatttcgtgtcactggctttgtagatttggatatagttaatcccaacaatgatatagcattgcgcatagtattagtcataaacttgggatgtaaaatgttgatgatatctacatcgtttggatttttatgtatccactttaataatatcatagctgtaacatcctcatgatttacgttaacgtcttcgtgggataagatagttgtcagttcatcctttgataattttccaaattctggatcggatgtcaccgcagtaatattgttgattatttctgacatcgacgcattatatagttttttaattccatatcttttagaaaagttaaacatccttatacaatttgtgaaattaatattatgaatcatagtttttacacatagatctactacaggcggaacatcaattattatggcagcaactagtatcatttctacattgtttatggtgatgtttatcttcttccagcgcatatagtctaatagcgattcaaacgcgtgatagtttataccattcaatataatcgcttcatcctttagatggtgatcctgaatgcgtttaaaaaaattatacggagacgccgtaataatttccttattcacttgtataatttccccattgatagaaaatattacgctttccattcttaaagtactataagtaattatagtataatgtaaacgtttatatattcaatatttttataaaaatcattttgacattaattcctttttaaatttccgtctatcatctatagaaacgtattctatgaatttataaaatgcttttacgtgtcctatcgtaggcgatagaaccgctaaaaagcctatcgaatttctacaaaagaatctgttatatggtatagggagagtataaaacattaaatgtccgtacttattaaagtattcagtagccaatcctaactctttcgaatacttattaatggctcttgttctgtacgaatctatttttttgaacaacggacctagtggtatatcttgttctatgtatctaaaataatgtctgactagatccgttagtttaatatccgcagtcatcttgtctagaatggcaaatctaactgcgggtttaggctttagtttagtttctatatctacatctatgtctttatctaacaccaaaaatataatagctaatattttattacaatcatccggatattcttctacgatctcactaactaatgtttctttggttatactagtatagtcactatcggacaaataaagaaaatcagatgatcgatgaataatacatttaaattcatcatctgtaagatttttgagatgtctcattagaatattattagggttagtactcattatcattcggcagctattacttattttattatttttcaccatatagatcaatcattagatcatcaaaatatgtttcaatcatcctaaagagtatggtgaatgactcttcccatctaatttctgaacgttcaccaatgtctctagccactttggcactaatagcgatcattcgcttagcgtcttctatattattaactggttgatttaatctatctagcaatggaccgtcggacagcgtcattctcatgttcttaatcaatgtacatacatcgccgtcatctaccaattcatccaacaacataagctttttaaaatcatcattataataggtttgatcgttgtcatttctccaaagaatatatctaataagtagagtcctcatgcttagttaacaactattttttatgttaaatcaattagtacaccgctatgtttaatacttattcatattttagtttttaggattgagaatcaatacaaaaattaatgcatcattaattttagaaatacttagtttccacgtagtcaatgaaacatttgaactcatcgtacaggacgttctcgtacaggacgtaactataaaccggtttatatttgttcaagatagatacaaatccgataactttttttacgaattctacgggatccactttaaaagtgtcataccgggttctttttatttttttaaacagatcaatggtgtgatgttgattaggtcttttacgaatttgatatagaatagcgtttacatattctccataatggtcaatcgccatttgttcgtatgtcataaattctttaattatatgacactgtgtattatttagttcatccttgttcattgttaggaatctatccaaaatggcaattatactagaactataggtgcgttgtatacacatattgatgtgtctgtttatacaatccatgatatttggatccatgctactaccttcgggtaaaattgtagcatcatataccatttctagtactttaggttcattattatccattgcagaggacgtcatgatcgaatcataaaaaaatatattatttttatgttattttgttaaaaataatcatcgaatacttcgtaagatactccttcatgaacataatcagttacaaaacgtttatatgaagtaaagtatctacgatttttacaaaagtccggatgcataagtacaaagtacgcgataaacggaataataatagatttatctagtctatctttttctatagctttcatagttagatacatggtctcagaagtaggattatgtaacatcagcttcgataaaatgactgggttatttagtcttacacattcgctcatacatgtatgaccgttaactacagagtctacactaaaatgattgaacaatagatagtctaccattgtttcgtattcagatagtacagcgtagtacatggcatcttcacaaattatatcattgtctaatagatatttgacgcatcttatggatcccacttcaacagccatcttaaaatcatattgctttcctttatcattaataatttctagaacatcatctctatcataaaagatacaaatattaactgtttgatccgtaataacattgctagtcaatagcaatttgttaataagatgcgctgggctcaatgtcttaataagaagtgtaagaggactatctccgaatttgttttgtttattaacatccgttgatggaagtaaaagatctataatgtctacattcttgactgttttagagcatacaatatggagaggtgtatttccatcatgatctggttttgagggactaattcctagtttcatcatccatgagattgtagaagcttttggattgtctgacataagatgtctatgaatatgatttttgccaaatttatccactatcctggcttcgaatccgatggacattatttttttaaacactctttctgaaggatctgtacacgccaacaacggaccacatccttcttcatcaaccgagttgttaatcttggctccatactgtaccaataaatttattctctctatgacttcatcatctgttcccgagagataatatagaggtgttttatgctgtttatcacacgcgtttggatctgcgccgtgcgtcagcagcatcgcgactattctattattattaattttagaagctatatgcaatggataatttccatcatcatccgtctcatttggagagtatcctctatgaagaagttcttcgacaaatcgttcatctagtcctttaattccacaatacgcatgtagaatgtgataattatttccagaaggttcgatagcttgtagcatattcctaaatacatctaaatttttactattatatttggcataaagagatagataatactcggccgacataatgttgtccattgtagtataaaaattaatatttctatttctatttctgtatatttgcaacaatttactctctataacaaatatcataacttagtttttttatgtcaagaaggcactggtttagttcatctataaatgtcacgccataactaccacgcatgccatactcagaattatgataaagatatttatccttggggtgtaggtaatggggattaatctttgttggatcagtctctaagttaacacatgtcacacatgatccatttatagttatatcacacgatgatgatttatgaattgattccggaagatcgctatcgtattttgtggttccacaattcatttccatacatgttattgtcacactaatattatgatgaactttatctagccgctgagtggtaaacaacagaacagatagtttattatctttaccaacaccctcagccgctgccacaaatctctgatccgtatccatgatggtcatgtttatttctagtccgtatccagtcaacactatgttagcatttctgtcgatatagctttcactcatatgacactcaccaataatagtagaattaatgtcgtaatttacaccaatagtgagttcggcggcaaagtaccaataccggtaatcttgtcgaggaggacatatagtattcttgtattctaccgaatacccgagagatgcgatacaaaagagcaagactaatttgtaaaccatcttactcaaaatatgtaacaatagtacgatgcaatgagtaagacaataggaaatctatcttatatacacataattattctatcaattttaccaattagttagtgtaatgttaacaaaaatgtgggagaatctaattagtttttctttacacaattgacgtacatgagtctgagttccttgtttttgctaattatttcatccaatttattattcttgacgatatcgagatcttttgtataggagtcaaacttgtattcaacatgcttttctataatcattttagctatttcggcatcatccaatagtacattttccagattagcagaatagatattaatgtcgtatttgaacagagcctgtaacatctcaatgtctttattatctatagccaatttaatgtccggaatgaagagaagggaattattggtgtttgtcgacgtcatatagtcgagcaagagaatcatcatatccacgtgtccattttttatagtgatgtgaatacaactaaggagaatagccagatcaaaagtagatggtatctctgaaagaaagtaggaaacaatacttacatcattaagcatgacggcatgataaaatgaagttttccatccagttttcccatagaacatcagtctccaatttttcttaacaaacagttttaccgtttgcatgttaccactatcaaccgcataatacaatgcggtgtttcccttgtcatcaaattgtgaatcatccagtccactgaatagcaaaatctttactattttggtatcttccaatgtggctgcctgatgtaatggaaattcattctctagaagatttttcaatgctccagcgttcaacaacgtacatactagacgcacgttattatcagctattgcataatacaaggcactatgtccatggacatccgccttaaatgtatctttactagagagaaagcttttcagctgcttagacttccaagtattaattcgtgacagatccatgtctgaaacgagacgctaattagtgtatattttttcattttttataattttgtcatattgcaccagaattaataatatctttaatagatctgattagtagatacatggctatcgcaaaacaacatatacacatttaataaaaataatatttattaagaaaattcagatttcacgtacccatcaatataaataaaataatgattccttacaccgtacccatattaaggagattccaccttacccataaacaatataaatccagtaatatcatgtctgatgatgaacacaaatggtgtattaaattccagtttttcaggagatgatctcgccgtagctaccataatagtagatgcctctgctacagttccttgttcgtcgacatctatctttgcattctgaaacattttataaatatataatgggtccctagtcatatgtttaaacgacgcattatctggattaaacatactaggagccatcatttcggctatcgacttaatatccctcttattttcgatagaaaatttagggagtttaagattgtacactttattccctaattgagacgaccaatagtctaattttgcagccgtgatagaatctgtgaaatgggtcatattatcacctattgccaggtacatactaatattagcatccttatacggaaggcgtaccatgtcatattctttgtcatcgattgtgattgtatttccttgcaatttagtaactacgttcatcatgggaaccgttttcgtaccgtacttattagtaaaactagcattgcgtgttttagtgatatcaaacggatattgccatatacctttaaaatatatagtattaatgattgcccatagagtattattgtcgagcatattagaatctactacattagacataccggatctacgttctactatagaattaattttattaaccgcatctcgtctaaagtttaatctatataggccgaatctatgatattgttgataatacgacggtttaatgcacacagtattatctacgaaactttgataagttagatcagtgtacgtatatttagatgttttcagcttagctaatcctgatattaattctgtaaatgctggacccagatctctttttctcaaatccatagtcttcaataattctattctagtattacctgatgcaggcaatagcgacataaacatagaaaacgaataaccaaacggtgagaagacaatattatcatcttgaatatttttatacgctactataccggcattggtaaatccttgtagacgataggcggacgctgaacacgctaacgatagtatcaataacgcaatcatgattttatggtattaataattaaccttatttttatgttcggtataaaaaaattattgatgtctacacatccttttgtaattgacatctatatatccttttgtataatcaactctaatcactttaacttttacagttttccctaccagtttatccctatattcaacatatctatccatatgcatcttaacactctctgccaagatagcttcagagtgaggatagtcaaaaagataaatatatagagcataatcattctcgtatactctgccctttattacatcacccgcattgggcaacgaataacaaaatgcaagcatcttgttaacgggctcgtaaattgggataaaaattatgtttttattgtcttatatctattttattcaagagaatattcaggaatttctttttccggttgtatctcgtcgcagtatatatcatttgtacattgtttcatattttttaatagtttacaccttttagtaggactagtatcgtacaattcatagctgtattttgaattccaatcacgcataaaaatatcttccaattgttgacgaagacctaatccatcatccggtgtaatattaatagatgctccacatgtatccgtaaagtaatttcctgtccaatttgaggtacctatataggccgttttatcggttaccatatatttggcatggtttaccctagaatacggaatgggaggatcagcatctggtacaataaatagctttacttctatatttatgtttttagattttagcatagcgatagatcttaaaaagtttctcatgataaacgaagatcgttgccagcaactaatcaatagcttaacggatacttgtctgtctatagcggatcttcttaattcatcttctatataaggccaaaacaaaattttacccgccttcgaataaataatagggataaagttcataacagatacataaacgaatttactcgcatttctaatacatgacaataaagcggttaaatcattggttctttccatagtacatagttgttgcggtgcagaagcaataaatacagagtgtggaacgccgcttacgttaatactaagaggatgatctgtattataatacgacggataaaagtttttccaattatatggtagattgttaactccaagataccagtatacctcaaaaatttgagtgagatccgctgccaagttcctattattgaagatcgcaatacccaattccttgacctgagttagtgatctccaatccatgttagcgcttcctaaataaatatgtgtattatcagatatccaaaattttgtatgaagaactcctcctaggatatttgtaatatctatgtatcgtacttcaactccggccatttgtagtctttcaacatcctttaatggtttgttagatttattaacggctactctaactcgtactcctcttttgggtaattgtacaatctcgtttaatattatcgtgccgaaattcgtacccacttcatccgataaactccaataaaaagatgatatatctagtgtttttgtggtattggatagaatttccctccacatgttaaatgtagacaaatatactttatcaaattgcatacctataggaatagtttctgtaatcactgcgattgtattatccggattcattttatttgttaaaagaataatcctatatcacttcactctattaaaaatccaagtttctatttctttcatgactgattttttaacttcatccgtttccttatgaagatgatgtttggcaccttcataaatttttatttctctattacaatttgcatgttgcatgaaataatatgcacctaaaacatcgctaatcttattgtttgttccctggagtatgagagtcggggggtgttaatcttggaaattatttttctaaccttgttggtagccttcaagacctgactagcaaatccagccttaattttttcatgattgactaatgggtcgtattggtatttataaactttatccatatctctagatactgattctggacatagctttccgactggcgcatttggtgtgatggttcccataagtttggcagctagcagattcagtcttgaaacagcatctgcattaactagaggagacattagaatcattgctgtaaacaagtttggattatcgtaagaggctagctcccatggaatgacccaataagtagatttaatagttaccacgtgctgtaccaaagtcatcaatcatcattttttcaccattacttcttccatgtccaatatgatcatgtgagaatactaaaattcctaacgatgatatgttttcagctagttcgtcataacgtccagaatgtttaccagctccatgacttatgaatactaatgccttaggatatgtaataggtttccaatatttacaatatatgtaatcattgtccagattgaacatacagtttgcactcatgattcacgttatataactatcaatattaacagttcgtttgatgatcatattatttttatgttttattgataattgtaaaaacatacaattaaatcaatatagaggaaggagacggctactgtcttttgtaagatagtcatggcgactaaattagattatgaggatgctgttttttactttgtggatgatgataaaatatgtagtcgcgactccatcatcgatctaatagatgaatatattacgtggagaaatcatgttatagtgtttaacaaagatattaccagttgtggaagactgtacaaggaattgatgaagttcgatgatgtcgctatacggtactatggtattgataaaattaatgagattgtcgaagctatgagcgaaggagaccactacatcaattttacaaaagtccatgatcaggaaagtttattcgctaccataggaatatgtgctaaaatcactgaacattggggatacaaaaagatttcagaatctagattccaatcattgggaaacattacagatttgatgaccgacgataatataaacatcttgatactttttctagaaaaaaaattgaattgatgatataggggtcttcataacgcataattattacgttagcattctatatccgtgttaaaaaaaattatcctatcatgtatttgagagttttatatgtagcaaacatgatagctgtgatgccaataagctttagatattcacgcgtgctagtgttagggatggtattatctggtggtgaaatgtccgttatataatctacaaaacaatcatcgcatatagtatgcgatagtagagtaaacatttttatagtttttactggattcatacatcgtctacccaattcggttataaatgaaattgtcgccaatcttacacccaaccccttgttatccattagcatagtattaacttcgttatttatgtcataaactgtaaatgattttgtagatgccatatcatacatgatattcatgtccctattataatcattactaactttatcacaatatatgttgataatatctatatatgatctagtctttgtgggcaactgtctatacaagtcgtctaaacgttgtttactcatatagtatcgaacagccatcattacatggtcccgttccgttgatagataatcgagtatgttagtggacttgtcaaatctatataccatattttctggaagtggatatacatagtcgtgatcaacattattgctagcctcatcttctatatcctgtactataccattatctatatcatctacataatctatgatattattacacataaacatcgacaacatactattgtttattatctaagtcctgttgatccaaacccttgatctcctctatttgtactatctagagattgtacttcttccagttctggataatatatacgttgatagattagctgagctattctatctccagtatttacattaaacgtacattttccattattaataagaatgactcctatgtttcccctataatcttcgtctattacaccacctcctatatcaatgccttttagtgacagaccagacctaggagctattctaccatagcagaacttaggcatggacatactaatatctgtcttaattaactgtctttctcctggagggatagtataatcgtaagcgctatacaaatcatatccggcagcacccggcgattgcctagtaggagatttagctctgttagtttccttaacaaatctaactggtgagttaatattcatgttgaacataaaactaatattttatttcaaaattatttaccatcccatatattccatgaataagtgtgatgattgtacacttctatagtatctatatacgatccacgataaaatcctcctatcaatagcagtttattatccactatgatcaattctggattatccctcggataaataggatcatctatcagagtccatgtattgctggattcacaataaaattccgcatttctaccaaccaagaataaccttctaccgaacactaacgcgcatgatttataatgaggataataagtggatggtccaaactgccactgatcatgattgggtagcaaatattctgtagttgtatcagtttcagaatgtcctcccattacgtatataacattgtttatggatgccactgctggattacatctaggtttcagaagactcggcatattaacccaagcagcatccccgtggaaccaacgctcaacagatgtgggatttggtagacctcctactacgtataatttattgttagcgggtatcccgctagcatacagtctggggctattcatcggaggaattggaatccaattgtttgatatataatttacagctatagcattgttatgtatttcattgttcatccatccaccgatgagatatactacttctccaacatgagtacttgtacacatatggaatatatctataatttgatccatgttcataggatactctatgaatggatacttgtatgatttgcgtggttgtttatcacaatgaaatattttggtacagtctagtatccattttacattatttatacctctgggagaaagataatttgacctgattacatttttgataaggagtagcagatttcctaatttatttcttcgcctcatataccacttaatgacaaaatcaactacataatcctcatctggaacatttagttcatcgctttctagaataagtttcatagatagataatcaaaattgtctatgatgtcatcttccagttccaaaaagtgtttggcaataaagtttttagtatgacataagagattggatagtccgtattctatacccatcatgtaacactcgacacaatattcctttctaaaatctcgtaagataaagtttatacaagtgtagatgataaattctacagaggttaatatagaagcacgtaataaattgacgacgttatgactatctatatatacctttccagtatatgagtaaataactatagaagttaaactgtgaatgtcaaggtctagacaaacccttgtaactggatctttatttttcgtgtatttttgacgtaaatgtgtgcgaaagtaaggagataactttttcaatatcgtagaattgactattatattgcctcctatggcatcaataattgttttgaatttcttagtcatagacaatgctaatatattcttacagtacacagtattgacaaatatcggcatttatgtttctttaaaagtcaacatctagagaaaaatgattatctttttgagacataactcccattttttggtattcacccacacgtttttcgaaaaaattagtttttccttccaatgatatattttccatgaaatcaaacggattggtaacattataaatttttttaaatcccaattcagaaatcaatctatccgcgacgaattctatatatgttttcatcatttcacaattcattcctataagtttaactggaagagccgcagtaagaaattcttgttcaatggatactgcatctgttataatagatctaacggtttcttcactcggtggatgcaataaatgtttaaacatcaaacatgcgaaatcgcagtgcagaccctcgtctctactaattagttcgttggaaaacgtgagtccgggcattaggccacgctttttaagccaaaatatggaagcgaatgatccagaaaagaaaattccttctactgcagcaaaggcaataagtctctctccataaccggcgctgtcatgtatccacttttgagcccaatcggccttcttttttacacaaggcatcgtttctatggcattaaagagatagtttttttcattactatctttaacataagtatcgatcaaaagactatacatttccgaatgaatgttttcaatggccatctgaaatccgtagaaacatctagcctcggtaatctgtacttctgtacaaaatcgttccgccaaattttcattcactattccgtcactggctgcaaaaaacgccaatacatgttttataaaatatttttcgtctggtgttagtttattccaatcattgatatctttagatatatctacttcttccactgtccaaaatgatgcctctgcctttttatacatgttccagatgtcatgatattggattgggaaaataacaaatctatttggatttggtgcaaggatgggttccataactaaattaacaataacaataaattttttttcagttatctatatgcctgtacttggattttttgtacatcgatatcgccgcaatcactacaataattacaagtattattgatagcattgttattagtactatcataattaaattatctacattcatgggtgctgaataatcgttattatcatcattatcattttgtaattgtgacatcatactagataaatcgtttgcgagattgttgtgggaagcgggcatggaggatgcattatcattattatttaacgccttccatttggattcacaaatgttacgcacattcaacattttatggaaactataattttgtgaaaacaaataacaagaaaactcgtcatcgttcaaatttttaacgatagtaaaccgattaaacgtcgagctaatttctaacgctagcgactctgttggatatgggtttccagatatatatcttttcagttcccctacgtatctataatcatctgtaggaaatggaagatatttccatttatctactgttcctaatatcatatgtggtggtgtagtagaaccattaagcgcgaaagatgttatttcgcatcgtattttaacttcgcaataatttctggttagataacgcactctaccagtcaagtcaatgatattagcctttacagatatattcatagtagtcgtaacgatgactccatcttttagatgcgatactcctttgtatgtaccagaatcttcgtacctcaaactcgatatatttaaacaagttaatgagatattaacgcgttttatgaatgatgatatataaccagaagttttatcctcggtggctagcgctataaccttatcattataataccaactagtgtgattaatatgtgacacgtcagtgtgggtacaaatatgtacattatcgtctacgtcgtattcgatacatccgcatacagccaacaaatataaaatgacaaatactctaacgccgttcgtacccatcttgatgcggtttaataaatgttttgatttcaatttattgtaaaaaaagattcggttttatactgttcgatattctcattgcttatattttcatctatcatctccacacagtcaaatccgtggttagcatgcacctcatcaaccggtaaaagactatcggactcttctatcattataactctagaatatttaatttggtcattattaatcaagtcaattatcttatttttaacaaacgtgagtattttactcattttttataaaaacttttagaaatatacagactctatcgtgtgtctatatcttctttttatatccaatgtatttatgtctgatttttcttcatttatcatatataatggtccaaattctacacgtgcttcggattcatccagatcattaaggttcttataattgtaacatccttctcttccctcttctacatcttccttcttattcttattcttagcgtcacagaatctaccacagcaggatcccatgacgagcgtcatattaaactaatccattttcaattataatatatgattagtaatgaccattaaaataaaaaatattcttcataaccggcaagaaagtgaaaagttcacattgaaactatgtcagtagtatacatcatgaaatgatgatatatatatactctattttggtggaggattatatgatataattcgtggataatcatttttaagacacatttctttattcgtaaatcttttcacgttaaatgagtgtccatattttgcaatttcttcatatgatggcggtgtacgtggacgaggctgctcctgttcttgttgtggtcgccgactgtcgtgtctgcgtttagatccctccattatcgcgattgcgtagatggagtactattttataccttgtaattaaatttttttattaattaaacgtataaaaacgttccgtatctgtatttaagagccagatttcgtctaatagaacaaatagctacagtaaaaataactagaataattgctacacccactagaaaccacggatcgtaatacggcaatcggttttcgataataggtggaacgtatattttatttaaggacttaacaattgtctgtaaaccacaatttgcttccgcggatcctgtattaactatctgtaaaagcatatgttgaccgggcggagccgaacattctccgatatctaatttctgtatatctataatattattaacctccgcatacgcattacagttcttttctagcttggataccgcactaggtacatcgtctagatctattcctatttcctcagcgatagctcttctatccttttccggaagcaatgaaatcacttcaataaatgattcaaccatgagtgtgaaactaagtcgagaattactcatgcatttgttagttattcggagcgcgcaatttttaaactgtcctataacctctcctatatgaatagcacaagtgacattagtagggatagaatgttgagctaatttttgtaaataactatctataaaaagattatacaaagttttaaactctttagtttccgccatttatccagtctgagaaaatgtctctcataataaatttttccaagaaactaattgggtgaagaatggaaacctttaatctatatttatcacagtctgttttggtacacatgatgaattcttccaatgccgtactaaattcgatatctttttcgatttctggatatgtttttaataaagtatgaacaaagaaatggaaatcgtaataccagttatgtttaactttgaaattgttttttattttcttgttaatgattccagccacttgggaaaagtcaaagtcgtttaatgccgatttaatacgttcattaaaaacaaactttttatcctttagatgaattattattggttcattggaatcaaaaagtaagatattatcgggtttaagatctgcgtgtaaaaagttgtcgcaacagggtagttcgtagattttaatgtataacagagccatctgtaaaaagataaactttatgtattgtaccaaagatttaaatcctaatttgatagctaactcggtatctactttatctgccgaatacagtgctaggggaaaaattataatgtttcctctttcatattcgtagttagttctcttttcatgttcgaaaaagtgaaacatgcggttaaaatagtttataacattaatattactgttaataactgccggataaaagtgggatagtaatttcacgaatttgatactgtcctttctctcgttaaacgcctttaaaaaaactttagaagaatatctcaatgagagttcctgaccatccatagtttgtatcaataatagcaacatatgaagaacacgtttatacagagtatgtaaaaatgttaatttatagtttaatcccatggcccacgcacacacgattaattttttttcatctccctttagattgttgtatagaaatttgggtactgtgaactccgccgtagtttccatgggactatataattttgtggcctcgaatacaaattttactacatagttatctatcttaaagactataccatatcctcctgtagatatgtgataaaaatcgtcgtttataggataaaatcgtttatccttttgttggaaaaaggatgaattaatgtaatcattctcttctatctttagtagtgtttccttattaaaattcttaaaataatttaacaatctaactgacggagcccaattttggtgtaaatctaattgggacattatattgttaaaatacaaacagtctcctaatataacagtatctgataatctatggggagacatccattgatattcaggggatgaatcattggcaacacccatttattgtacaaaaagccccaatttacaaacgaaagtccaggtttgatagagacaaacaattaactattttgtctctgtttttaacacctccacagtttttaatttctttagtaatgaaattattcacaatatcagtatcttctttatctaccagagattttactaacttgataaccttggctgtctcattcaatagggtagtaatatttgtatgtgtgatattgatatctttttgaattgtttcttttagaagtgattctttgatggtgccagcatacgaattacaataatgcagaaactcggttaacatgcaggaattatagtaagccaattccaattgttgcctgtgttgtattagagtgtcaatatgagcaatggtgtccttgcgtttctctgatagaatgcgagcagcgattttggcgttatcatttgacgatatttctggaatgacgaatcctgtttctactaactttttggtaggacaaagtgaaacaatcaagaagatagcttctcctcctatttgtggaagaaattgaactcctctagatgatctactgacgatagtatctccttgacagatattggaccgaattacagaagtacctggaatgtaaagccctgaaaccccctcattttttaagcagattgttgccgtaaatcctgcactatgcccaagatagagagctcctttggtgaatccatctctatgtttcagtttaaccaagaaacagtcagctggtctaaaatttccatctctatctaatacagcatctaacttgatgtcaggaactatgaccggtttaatgttatatgtaacattgagtaaatccttaagttcataatcatcactgtcatcagttatgtacgatccaaacaatgtttctaccggcatagtggatacgaagatgctatccatcagaatgtttccctgattagtattttctatatagctattcttctttaaacgattttccaaatcagtaactatgttcatttttttaggagtaggacgcctagccagtatggaagaggattttctagatcctctcttcaacatctttgatctcgatggaatgcaaaaccccatagtgaaacaaccaacgataaaaataatattgtttttcactttttataattttaccatctgactcatggattcattaatatctttataagagctactaacgtataattctttataactgaactgagatatatacaccggatctatggtttccataattgagtaaatgaatgctcggcaataactaatggcaaatgtatagaacaacgaaattatactagagttgttaaagttaatattttctatgagctgttccaataaattatttgttgtgactgcgttcaagtcataaatcatcttgatactatccagtaaaccgtttttaagttctggaatattatcatcccattgtaaagcccctaattcgactatcgaatatcctgctctgatagcagtttcaatatcgacggacgtcaatactgtaataaaggtggtagtattgtcatcatcgtgataaactacgggaatatggtcgttagtaggtacggtaactttacacaacgcgatatataactttccttttgtaccatttttaacgtagttgggacgtcctgcagggtattgttttgaagaaatgatatcgagaacagatttgatacgatatttgttggattcctgattattcactataatataatctagacagatagatgattcgataaatagagaaggtatatcgttggtaggataatacatccccattccagtattctcggatactctattgatgacactagttaagaacatgtcttctattctagaaaacgaaaacatcctacatggactcattaaaacttctaacgctcctgattgtgtctcgaatgcctcgtacaaggatttcaaggatgccatagattctttgaccaacgatttagaattgcgtttagcatctgatttttttattaaatcgaatggtcggctctctggtttgctaccccaatgataacaatagtcttgtaaagataaaccgcaagaaaatttatacgcatccatccaaataaccctagcaccatcggatgatattaatgtattattatagattttccatccacaattattgggccagtatactgttagcaacggtatatcgaatagattactcatgtaacctactagaatgatagttcgtgtactagtcataatatctttaatccaatctaaaaaatttaaaattagattttttacactgttaaagttaacaaaagtattacccgggtacgtggatatcatatatggcattggtccattatcagtaatagctccataaactgatacggcgatggtttttatatgtgtttgatctaacgaggaagaaattcgcgcccacaattcatctctagatatgtatttaatatcaaacggtaacacatcaatttcgggacgcgtatatgtttctaaatttttaatccaaatataatgatgacctatatgccctattatcatactgtcaactatagtacacctagggaacttacgatacatctgtttcctataatcgttaaattttacaaatctataacatgctaaaccttttgacgacagccattcattaatttctgatatggaatctgtattctcgataccgtatcgttctaaagccagtgctatatctccctgttcgtgggaacgctttcgtataatatcgatcaacggataatctgaagtttttggagaataatatgactcatgatctatttcgtccataaacaatctagacataggaattggaggcgatgatcttaattttgtgcaatgagtcgtcaatcctataacttctaatcttgtaatattcatcatcgacataatactatctatgttatcatcgtatattagtataccatgaccttcttcatttcgtgccaaaatgatatacagtcttaaatagttacgcaatatctcaatagtttcataattgttagctgttttcatcaaggtttgtatcctgtttaacatgatggcgttctataacgtctctattttctatttttaattttttaaatttttaacgatttactgtggctagatacccaatctctctcaaatatttttttagcctcgcttacaagctgtttatctatactattaaaactgacgaatccgtgattttggtaatgggttccgtcgaaatttgccgaagtgatatgaacatattcgtcgtcgactatcaacaattttgtattattctgaatagtgaaaaccttcacagatagatcattttgaacacacaacgcatctagacttttggcggttgccatagaatatacgtcgttcttatcccaattaccaactagaagtctgatcttaactcctctattaatggctgcttctataatggagttgtaaatgtcgggccaatagtagctattaccgtcgacacgtgtagtgggaactatggccaaatgttcaatatctatactagtcttagctgacctgagtttatcaataactacatcggtatctagatctctagaatatcccaataggtgttccggagaatcagtaaagaacactccacctataggattcttaatatgatacgcagtgctaactggcaaacaacaagccgcagagcataaattcaaccatgaattttttgcgctattaaaggctttaaaagtatcaaatcttctacgaagatctgtggccagcgggggataatcagaatatacacctaacgttttaatcgtatgtatagatcctccagtaaatgacgcgtttcctacataacatctttcatcatctgacacccaaaaacaaccgagtagtagtcccacattattttttttatctatattaacggttataaaatttatatccgggcagtgactttgtagctctcccagatttcttttccctcgttcatctagcaaaactattattttaatccctttttcagatgcctcttttagtttatcaaaaataagcgctcccctagtcgtactcagaggattacaacaaaaagatgctatgtatatatatttcttagctagagtgataatttcgttaaaacattcaaatgttgttaaatgatcggatctaaaatccatattttctggtagtgtttctaccagcctacattttgctcccgcaggtaccgatgcaaatggccacatttagttaacataaaaacttatacatcctgttctatcaacgattctagaatatcatcggctatatcgctaaaattttcatcaaagtcgacatcacaacctaactcagtcaatatattaagaagttccatgatgtcatcttcgtctatttctatatccgtatccattgtagattgttgaccgattatcgagtttaaatcattactaatactcaatccttcagaatacaatctgtgtttcattgtaaatttataggcggtgtatttaagttggtagattttcaattatgtattaatatagcaacagtagttcttgctcctccttgattctagcatcctcttcattattttcttctacgtacataaacatgtccaatacgttagacaacacaccgacgatggcggccgcaggatcctcaagagccagactcacatttcagctgcttttccaggccacagatgatcagttccaggccaaaaaggaatgcaggctcagccccttggtggtcaaacaactcaatagcttgccgcagcagtggtggcatggagtcagtggtgggggtctccctctcctccttggcaacttggtgctcctggtcctccagcacacagcccaaggtgaagtggcccacagcagagagggcatacaaggcattttccagggagaagccttgttggcacaggaatgccagctggttctccagggtctcatactgcttctctgtaggcctggtgcccaagtgaactttggcaccatcccggtgggagagcaaggcacatctgaagctcttggcattgttcctcaggaagtcctgccaggactccccttccagagggcagaagtgggtgtggtgcctgtccaacatctcaatggccagggcatcaagcagagccctcttgttcttcacatgccagtacagggtaggctgctccacacccagcttctgggccagcttcctggtggtcaagccctcaatgccaacttcattcaggagctccaaggcagagttgatgactttgctcttgtccagtctggacatctcgagttatgatctacttccttaccgtgcaataaattagaatatattttctacttttacgagaaattaattattgtatttattatttatgggtgaaaaacttactataaaaagcgggtgggtttggaattagtgaaagcttacagacacgaatatgactaaaccgatgaccatttaaaaacccctctctagctttcacttaaactgtatcgatcattcttttagcacatgtataatataaaaacattattctatttcgaatttaggcttccaaaaatttttcatccgtaaaccgataataatatatatagacttgttaatagtcggaataaatagattaatgcttaaactatcatcatctccacgattagagatacaatatttacattctttttgctgtttcgaaactttatcaatacacgttaatacaaacccaggaaggagatattgaaactgaggctgttgaaaatgaaacggtgaatacaataattcagataatgtaaaatcatgattccgtattctgatgatattagaactgctaatggatgtcgatggtatgtatctaggagtatctattttaacaaagcatcgatttgctaatatacaattatccttttgattaattgttattttattcatattcttaaaaggtttcatatttatcaattcttctacattaaaaatttccatttttaatttatgtagccccgcaatactcctcattacgtttcattttttgtctataatatccattttgttcatctcggtacatagattatccaattgagaagcgcatttagtagttttgtacattttaagtttattgacgaatcgtcgaaaactagttatagttaacattttattatttgataccctgatattaatacccctgccgttactattatttataactgatgtaatccacgtaacattggaattaactatcgatagtaatgcatcgacgcttccaaaattgtctattataaactcaccgataatttttttattgcatgttttcatattcattaggattatcaaatctttaatcttattacgattgtatgcgttgatattacaagacgtcattctaaaagacggaggatctccatcaaatgccagacaatcacgtacaaagtacatggaaataggttttgttctattgcgcatcatagatttatatagaacacccgtagaaatactaatttgttttactctataaaatactaatgcatctatttcatcgttttgtataacgtctttccaagtgtcaaattccaaatttttttcattgatagtaccaaattcttctatctctttaactacttgcatagataggtaattacagtgatgcctacatgccgttttttgaaactgaatagatgcgtctagaagcgatgctacgctagtcacaatcaccactttcatatttagaatatatatatgtaaaaatatagtagaatttcattttgtttttttctatgctataaatgaattctcattttgcatctgctcatactccgttttatattaataccaaagaaggaagatatctggttctaaaagccgttaaagtatgcgatgttagaactgtagaatgcgaaggaagtaaagcttcctgcgtactcaaagtagataaaccctcatcgcccgcgtgtgagagaagaccttcgtccccgtccagatgcgagagaatgaataaccctggaaaacaagttccgtttatgaggacggacatgctacaaaatatgttcgcggctaatcgcgataatgtagcttctagacttttgtcctaaaatactattatatccttttcgatattaataaatccgtgtcgtccaggttttttatctctttcagtatgtgaatagataggtattttatctctattcatcatcgaatttaagagatccgataaacattgtttgtattctccagatgtcagcatctgatacaacaatatatgtgcacataaacctctggcacttatttcatgtaccttccccttatcactaaggagaatagtatttgagaaatatgtatacatgatattatcatgaattagatatacagaatttgtaacactctcgaaatcacacgatgtgtcggcgttaagatctaatatatcactcgataacacattttcatctagatacactagacattttttaaagctaaaatagtctttagtagtaacagtaactatgcgattattttcatcgatgatacatttcatcggcatattattacgcttaccatcaaagactataccatgtgtatatctaacgtattctagcatggttgccatacgcgcattaaacttttcaggatctttggatagatcttccaatctatctatttgagaaaacatttttatcatgttcaatagttgaaacgtcggatccactatatagatattatctataaagattttaggaactacgttcatggtatcctggcgaatattaaaactatcaatgatatgattatcgttttcatcttttatcaccatatagtttctaagatatgggattttacttaatataatattatttcccgtgataaattttattagaaaggccaaatctataagaaaagtcctagaattagtctgaagaatatctatatcgccgtatagtatatttggattaattagatatagagaatatgatccgtaacatatacaacttttattatggcgtctaagatattcttccatcaacttattaacatttttgactagggaagatacattatgacgtcccattacttttgccttgtctattactgcgacgttcatagaatttagcatatctcttgccaattcttccattgatgttacattataagaaattttagatgaaattacatttggagctttaatagtaagaactcctaatatgtccgtgtatgtggtcactaatacagattgtagttctataatcgtaaataatttacctatattatatgtttgagtctgtttagaaaagtagctaagtatacgatcttttatttctgatgcagatgtattaacatcggaaaaaaatctttttttattcttttttactaaagatacaaatatgtctttgttaaaaacagttattttctgaatatttctagcttgtaattttaacatatgatattcgttcacactaggtactctgcctaaataggtttctataatctttaatgtaatattaggaaaagtattctgatcaggattcctattcattttgaggatttaaaactctgattattgtctaatatggtctctacgcaaactttttcacagagcgatagagtttttgataactcgtttttcttaagaaatataaaactactgtctccagagctcgctctatcttttattttatctaattcgatacaaactcctgatactggttcagaaagtaattcattaattttcagtcctttatagaagatatttaatatagataatacaaaatcttcagtttttgatatcgatctgattgatcctagaactagatatattaataacgtgctcattaggcagtttatggcagcttgataattagatatagtatattccagttcatatttattagataccgcattgcccagattttgatattctatgaattcctctgaaaataaatccaaaataactagacattctattttttgtggattagtgtactctcttccctctatcatgttcactactggtgtccacgatgataaatatctagagggaatataatatagtccataggatgccaatctagcaatgtcgaataactgtaattttattcttcgctcttcattatgaattgattcttgaggtataaacctaacacaaattatattattagacttttcgtatgtaatgtctttcatgttataagtttttaatcctggaatagaatctattttaatgaggcttttaaacgcagagttctccaacgagtcaaagcataatactctgttgtttttcttatatacgatgttacgattttcttctttgaatggaataggtttttgaattagtttataattacaacataatagataaggaagtgtgcaaatagtacgcggaaaaaacataatagctcccctgttttcatccatggttttaagtaaatgatcactggcttctttagtcaatggatattcgaacattaaccgtttcatcatcattggacagaatccatatttcttaatgtaaagagtgatcaaatcattgtgtttattgtaccatcttgttgtaaatgtgtattcggttatcggatctgctcctttttctattaaagtatcgatgtcaatctcgtctaagaattcaactatatcgacatatttcatttgtatacacataaccattactaacgtagaatgtataggaagagatgtaacgggaacagggtttgttgattcgcaaactattctaatacataattcttctgttaatacgtcttgcacgtaatctattatagatgccaagatatctatataattattttgtaagatgatgttaactatgtgatctatataagtagtgtaataattcatgtattttgatatatgttccaactctgtctttgtgatgtctagtttcgtaatatctatagcatcctcaaaaaatatattcgcatatattcccaagtcttcagttctatcttctaaaaaatcttcaacgtatggaatataataatctattttacctcttctgatatcattaatgatatagtttttgacactatcttctgtcaattgattcttattcactatatctaagaaacggatagcgtccctaggacgaactactgccattaatatctctattatagcttctggacataattcatctattataccagaattaatgggaactattccgtatctatctaacatagttttaagaaagtcagaatctaagacttgatgttcatatattggttcatacatgaaatgatctctattgatgatagtgactatttcattctctgaaaattggtaactcattctatatatgctttccttgttgatgaaggatagaatatactcaatagaatttgtaccaacaaactgttctcttatgaatcgtatatcatcatctgaaataatcatgtaaggcatacatttaacaattagagacttgtctcctgttatcaatatactattcttgtgataatttatgtgtgaggcaaatttgtccacgttctttaattttgttatagtagatatcaaatccaatggagctacagttcttggcttaaacagatatagtttttctggaacaaattctacaacattattataaaggactttgggtagataagtgggatgaaatcctattttaattaatgcgatagccttgtcctcgtgcagatatccaaacgcttttgtgatagtatggcattcattgtctagaaacgctctacgaatatctgtgacagatatcatctttagagaatatactagtcgcgttaatagtactacaatttgtattttttaatctatctcaataaaaaaattaatatgtatgattcaatgtataactaaactactaactgttattgataactagaatcagaatctaatgatgacgtaaccaagaagtttatctactgccaatttagctgcattatttttagcatctcgtttagattttccatcggccttatcgaatactcttccgtcgatgtctacacaggcataaaatgtaggagagttactaggcccaactgattcaatacgaaaagaccaatctctcctagtaatttggcagtactcattaataacggtgacagggttagcatctttccaatcaataatttttttagccggaataacatcatcaaaagacttatgatcctctctcattgatttttcgcgggatacatcatctattatgacgtcagccatagcatcagcatccggcttatccgcctccgttgtcataaaccaacgaggaggaatatcgtcggagctgtacaccatagcactacgttgaagatcgtacagagctttattaacttctcgcttctccatattaagttgtctagttagttgtgcagcagtagctccttcgattccaatgtttttaatagccgcacacacaatctctgcgtcagaacgctcgtcaatatagatcttagacatttttagagagaactaacgcaaccagcaataaaactgaacctactttatcatttttttattcatcatcctctggtggttcgtcgttcctatcaaatgtagctctgattaacccgtcatctataggtgatgctggttctggagattctggaggagatggattattatctggaagaatctctgttatttccttgttttcatgtatcgattgcgttgtaacattaagattgcgaaatgctctaaatttgggaggcttaaagtgttgtttgcaatctctacacgcgtgtctaactagtggaggttcgtcagctgctctagtttgaatcatcatcggcgtagtattcctacttttacagttaggacacggtgtattgtatttctcgtcgagaacgttaaaataatcgttgtaactcacatcctttattttatctatattgtattctactcctttcttaatgcattttataccgaataagagatagcgaaggaattctttttcggtgccgctagtacccttaatcatatcacatagtgttttatattccaaatttgtggcaatagacggtttatttctatacgatagtttgtttctggaatcctttgagtattctataccaatattattctttgattcgaatttagtttcttcgatattagattttgtattacctatattcttgatgtagtactttgatgatttttccatggcccattctattaagtcttccaagttggcatcatccacatattgtgatagtaattctcggatatcagtagcggctaccgccattgatgtttgttcattggatgagtaactactaatgtatacattttccatttataacacttatgtattaactttgttcatttatattttttcattattatgttgatattaacaaaagtgaatatatatatgttaataattgtattgtggttatacggctacaattttataatgagtgaaagtcagtgtccgatgatcaatgacgatagctttactctgaaaagaaagtatcaaatcgatagtgcggagtcaacaataaaaatggataagaagaggataaagtttcagaatagagccaaaatggtaaaagaaataaatcagacaataagagcagcacaaactcattacgagacattgaaactaggatacataaaatttaagagaatgattatgactactactctagaagatatagcaccatctattccaaataatcagaaaacttataaactattctcggacatttcagccatcggcaaagcatcacagaatccgagtaagatggtatatgctctgctgctttacatgtttcccaatttgtttggagatgatcatagattcattcgttatagaatgcatccaatgagtaaaatcaaacacaagatcttctctcctttcaaacttaatcttattagaatattagtggaagaaagattctataataatgaatgcagatctaataaatggagaataattggaacacaagttgataaaatgttgatagctgaatctgataaatatacaatagatgcaaggtataacctaaaacccatgtatagaatcaagggagaatctgaagaagataccctctttatcaaacagatggtagaacaatgtgtgacatcccaggaattggtggaaaaagtgttgaagatactgtttagagatttgttcaagagtggagaatacaaagcgtacagatacgatgatgatgtagaaaatggatttattggattggatacactaaaattaaacattgttcatgatatagttgaaccatgtatgcctgttcgtaggccagtggctaagatactgtgtaaagaaatggtaaataaatactttgagaatccgctacatattattggtaaaaatcttcaagagtgcattgactttgttagtgaataggcatttcatctttctccaatactaattcaaattgttaaattaataatggatagtataaatagttattagttataagatagtaaaaataattattagaataagagtgtagtatcatagataactctcttctataaaaatggattttattcgtagaaagtatcttatatacacagtagaaaataatatagattttttaaaggatgatacattaagtaaagtaaacaattttaccctcaatcatgtactagctctcaagtatctagttagcaattttcctcaacacgttattactaaggatgtattagctaataccaatttttttgttttcatacatatggtacgatgttgtaaagtgtacgaagcggttttacgacacgcatttgatgcacccacgttgtacgttaaagcattgactaagaattatttatcgtttagtaacgcaatacaatcgtacaaggaaaccgtgcataaactaacacaagatgaaaaatttttagaggttgccgaatacatggacgaattaggagaacttataggcgtaaattatgacttagttcttaatccattatttcacggaggggaacccatcaaagatatggaaatcatttttttaaaactgtttaagaaaacagacttcaaagttgttaaaaaattaagtgttataagattacttatttgggcatacctaagcaagaaagatacaggcatagagtttgcggataatgatagacaaaatatatacactctatttcaacaaactggtagaatcgtccatagcaatctaacagaaacgtttagagattatatctttcccggagataagactagctattgggtgtggttaaacgaaagtatagctaatgatgcggatatcgttcttaatagacacgccattaccatgtatgataaaattcttagttatatatactctgagataaaacaaggacgcgttaataaaaacatgcttaagttagtttatatctttgagcctgaaaaagatatcagagaacttctgctagaaatcatatatgatattcctggagatatcctatctattattgatgcaaaaaacgacgattggaaaaaatattttattagtttttataaagctaattttattaacggtaatacatttattagtgatagaacgtttaacgaggacttattcagagttgttgttcaaatagatcccgaatatttcgataatgaacgaattatgtctttattctctacgagtgctgcggacattaaacgatttgatgagttagatattaataacagttatatatctaatataatttatgaggtgaacgatatcacattagatacaatggatgatatgaagaagtgtcaaatctttaacgaggatacgtcgtattatgttaaggaatacaatacatacctgtttttgcacgagtcggatcccatggtcatagagaacggaatactaaagaaactgtcatctataaaatccaagagtagacggctgaacttgtttagcaaaaacattttaaaatattatttagacggacaattggctcgtctaggtcttgtgttagatgattataaaggagacttgttagttaaaatgataaaccatcttaagtctgtggaggatgtatccgcattcgttcgattttctacagataaaaaccctagtattcttccatcgctaatcaaaactattttagctagttataatatttccatcatcgtcttatttcaaaggtttttgagagataatctatatcatgtagaagaattcttggataaaagcatccatctaaccaagacggataagaaatatatacttcaattgataagacacggtagatcatagaacagaccaaatatattattaataatttgtatatacatagatataattatcacacatttttgataaatgggaactgctgcaacaattcagactcccaccaaattaatgaataaagaaaatgcagaaatgattttggaaaaaattgttgatcatatagttatgtatattagtgacgaatcaagtgattcagaaaataatcctgaatatattgattttcgtaacagatacgaagactatagatctctcattataaaaagtgatcacgagtttgtaaagctatgtaaaaatcatgcggagaaaagttctccagaaacgcaacaaatgattatcaaacacatatacgaacaatatcttattccagtatctgaagtactattaaaacctataatgtccatgggtgacataattacatataacggatgtaaagacaatgaatggatgctagaacaactctctaccctaaactttaacaatctccgcacatggaactcatgtagcataggcaatgtaacgcgtctgttttatacattttttagttatctgatgaaagataaactaaatatataagtataatcccattctaatactttaacctgatgtattagcatcttattagaatattaacctaactaaaagacataacataaaaactcattacatagttgataaaaagcggtaggatataaatattatggctgccaccgttccgcgttttgacgacgtgtacaaaaatgcacaaagaagaattctagatcaagaaacattttttagtagaggtctaagtagaccgttaatgaaaaacacatatctatttgataattacgcgtatggatggataccagaaactgcaatttggagtagtagatacgcaaacctagatgctagtgactattatcccatttcgttgggattacttaaaaagttcgagtttctcatgtctctatataaaggtcctattcccgtatatgaagaaaaagtaaatactgaattcatagccaatggatcgttctctggtagatacgtatcatatcttcgaaagttttctgcccttccaacaaacgagtttattagttttttgttactgacttccattccaatctataatatcttgttctggtttaaaaacacacagtttgatattactaaacacacattattcagatacgtctatacagataatgccaaacacctggcgttggctaggtatatgcatcaaacaggagactataagcctttgtttagtcgtctcaaagagaattatatatttaccggtcccgttccaataagtatcaaagatatagatcaccctaatcttagtagagcaagaagtccatccgattatgagacattagctaatattagtactatattgtactttaccaagtatgatccggtattaatgtttttattgttttacgtacctgggtattcaattactacaaaaattactccagccgtagaatatctaatggataaactgaatctaacaaagagcgacgtacaactgttgtaaattattttatgcttcgtaaaatgtaggttttgaaccaaacattctttcaaagaatgagatgcataaaactttattatccaatagattgactatttcggacgtcaatcgtttaaagtaaacttcgtaaaatattctttgatcactgccgagtttaaaacttctatcgataattgtctcatatgttttaatatttacaagttttttggtccatggtacattagccggacaaatatatgcaaaataatatcgttctccaagttctatagtttctggattatttttattatattcagtaactaaatacatattagggttatctgcggatttataatttgagtgatgcattctactcaacataaataattctagaggagacgatctactatcaaattcggatcgtaaatctgtttctaaagaacggagaatatctatacatacctgattagaattcatccgtccttcagacaacatctcagacagtctggttttgtacatcttaatcatattcttatgaaacttggaaacatctcttctagtttcactagtacctttattaattctctcaggtacagattttgaattcgacgatgctgagtatttcatcgttgtatatttcttcttcgattgcataatcagattcttatataccgcctcaaactctattttaaaattattaaacaatactctattattaatcagtcgttctaactctttcgctatttctatagacttatctacatcttgactgtctatctctgtaaacacggagtcggtatctccatacacgctacgaaaacgaaatctgtaatctataggcaacgatgttttcacaatcggattaatatctctatcgtccatataaaatggattacttaatggattggcaaaccgtaacataccgttagataactctgctccatttagtaccgattctagatacaagatcattctacgtcctatggatgtgcaactcttagccgaagcgtatgagtatagagcactatttctaaatcccatcagaccatatactgagttggctactatcttgtacgtatattgcatggaatcatagatggccttttcagttgaactggtagcctgttttagcatctttttatatctggctctctctgccaaaaatgttcttaatagtctaggaatggttccttctatcgatctatcgaaaattgctatttcagagatgaggttcggtagtctaggttcacaatgaaccgtaatatatctaggaggtggatatttctgaagcaatagctgattatttatttcttcttccaatctattggtactaacaacgacaccgactaatgtttccggagatagatttccaaagatacacacattaggatacagactgttataatcaaagattaatacattattactaaacattttttgttttggagcaaataccttaccgccttcataaggaaacttttgttttgtttctgatctaactaagatagttttagtttccaacaatagctttaacagtggacccttgatgactgtactcgctctatattcgaataccatggattgaggaagcacatatgttgacgcacccgcgtctgtttttgtttctactccataatactcccacaaatactgacacaaacaagcatcatgaatacagtatctagccatatctaaagctatgtttagattataatccttatacatctgagctaaatcaacgtcatcctttccgaaagataatttatatgtatcattaggtaaagtaggacataatagtacgactttaaatccattttcccaaatatctttacgaattactttacatataatatcctcatcaacagtcacataattacctgtggttaaaacctttgcaaatgcagcggctttgcctttcgcgtctgtagtatcgtcaccgatgaacgtcatttctctaactcctctatttaatactttacccatgcaactgaacgcgttcttggatatagaatccaatttgtacgaatccaatttttcaaatttttgaatgaatgaatatagatcgaaaaatatagttccattattgttattaacgtgaaacgtagtattggccatgccgcctactcccttatgactagactgatttctctcataaatacagagatgtacagcttcctttttgtccggagatctaaagataattttctctcctgttaataactctagacgattagtaatatatctcagatcaaagttatgtccgttaaaggtaacgacgtagtcgaacgttagttccaacaattgtttagctattcgtaacaaaactatttcagaacatagaactagttctcgttcgtaatccatttccattagtgactgtatcctcaaacatcctctatcgacggcttcttgtatttcctgttccgttaacatctcttcattaatgagcgtaaacaataatcgtttaccacttaaatcgatataacagtaacttgtatgcgagattgggttaataaatacagaaggaaacttcttatcgaagtgacactctatatctagaaataagtacgatcttgggatatcgaatctaggtatttttttagcgaaacagttacgtggatcgtcacaatgataacatccattgttaatctttgtcaaatattgctcgtccaacgagtaacatccgtctggagatatcccgttagaaatataaaaccaactaatattgagaaattcatccatggtggcattttgtatgctgcgtttctttggctcttctatcaaccacatatctgcgacggagcattttctatctttaatatctagattataacttattgtctcgtcaatgtctatagttctcatctttcccaacggcctcgcattaaatggaggaggagacaatgactgatatatttcgtccgtcactacgtaataaaagtaatgaggaaatcgtataaatacggtctcgccatttcgacatctggatttcagatataaaaatctgttttcaccgtgactttcaaaccaattaatgcaccgaacatccatttatagaatttagaaatatattttcatttaaatgaatcccaaacattggggaagagccgtatggaccattatttttatagtactttcgcaagcgggtttagacggcaacatagaagcgtgtaaacgaaaactatatactatagttagcactcttccatgtcctgcatgtagacggcacgcgactatcgctatagaggacaataatgtcatgtctagcgatgatctgaattatatttattattttttcatcagattatttaacaatttggcatctgatcccaaatacgcgatcgatgtgacaaaggttaaccctttataaacttaacccattataaaacttatgattagtcacaactgaaataaccgcgtgattattttttggtataattctacacggcatggtttctgtgactatgaattcaacccccgttacattagtgaaatctttaacaaacagcaagggttcgtcaaagacataaaactcattgtttacaatcgaaatagaccccctatcacacttaaaataaaaaatatccttatcctttaccaccaaataaaattctgattggtcaatgtgaatgtattcacttaacagttccacaaatttatttattaactccgaggcacatacatcgtcggtattttttatggcaaactttactcttccagcatccgtttctaaaaaaatattaacgagttccatttatatcatccaatattattgaaatgacgttgatggacagatgatacaaataagaaggtacggtacctttgtccaccatctcctccaattcatgctctattttgtcattaactttaatgtatgaaaacagtacgccacatgcttccatgacagtgtgtaacactttggatacaaaatgtttgacattagtataattgtccaagactgtcaatctataatagatagtagctataatatattctatgatggtattgaagaagatgacaaccttggcatattgatcatttaacacagacatggtatcaacagatagcttgaatgaaagagaatcagtaattggaataagcgtcttctcgatagagtgtccgtataccaacatgtctgatattttgatgtattccattaaattatttagttttttctttttattctcgttaaacagcatttctgtcaacggaccccaacatcgttgaccgattaagttttgattgatttttccgtgtaaggcgtatctagtcagatcgtatagcctatccaataatccatcgtctgtgtgtagatcacatcgtacactttttaattctctatagaagagcgacagacatctggagcaattacagacagcaatttctttattctctacagatgtaagatacttgaagacattcctatgatgatgcagaattttggataacacggtattgatggtatctgttaccataattcctttgatggctgatagtgtcagagcacaagatttccaatctttgacaatttttagcaccattatctttgttttgatatctatatcagacagcatggtgcgtctgacaacacagggattaagacggaaagatgaaatgattctctcaacatcttcaatagataccttgctattttttctggcattatctatatgtgcgagaatatcctctagagaatcagtatcctttttgatgatagtggatctcaatgacatgggacgtttaaaccttcttattctatcaccagattgcatggtgatttgtcttctttcttttatcataatgtaatctctaaattcatcggcaaattgtctatatctaaaatcataatatgagatgtttacctctacaaatatctgttcgtccaatgttagagtatttacatcagttttgtattccaaattaaacatggcaacggatttaattttatattcctctattaagtcctcgtcgataataacagaatgtagataatcatttaatccgtcgtacatggttggaagatgcttgttgacaaaatctttaattgtcttgatgaaggtgggactatatctaacatcttgattaataaaatttataacattgtccataggatactttgtaactagttttatacacatctcttcatcggtaagtttagacagaatatcgtgaacaggtggtatattatattcatcagatatacgaagaacaatgtccaaatctatattgtttaatatattatatagatgtagcgtagctcctacaggaatatctttaactaagtcaatgatttcatcaaccgttagatctattttaaagttaatcatataggcattgatttttaaaaggtatgtagccttgactacattctcattaattaaccattccaagtcattgtgtgtaagaagattatattctatcataagcttgactacatttggtcccgataccattaaagaattcttatgatataaggaaacagattttaggtactcatctactctacaagaattttggagagccttaacgatatcagtgacgtttattatttcaggaggaaagaatctaacattgagaatatcggaattaatagcttccagatacagtgattttggcaatagtccgtgtaatccataatccagtaacacgagctggtgcttgctagacaccttttcaatgtttaatttttttgaaataagctttgataaagccttcctcgcaaattccggatacatgaacatgtcggcgacatgattaagtattgttttttcattatttttatattttctcaacaagttctcaataccccaatagatgatagaatatcacccaatgcgtccatgttgtctatttccaacaggtcgctatatccaccaatagaagtttttccaaaaaagattctaggaacagttctaccaccagtaatttgttcaaaataatcccgcaattcattttcgggtttaaattctttaatatcgacaatttcatacgctcctcttttgaaactaaacttatttagaatatccagtgcatttctacaaaaaggacatgtatacttgacaaaaattgtcactttgttattggccaacctttgttgtacaaattcctcggccattttaatatttaagtgatataaaactatctcgacttatttaactctttagtcgagatatatggacgcagatagctatatgatagccaactacagaaggcaaacgctataaaaaacataattacgacgagcatatttataaatatttttattcagcattacttgatatagtaatattaggcacagtcaaacattcaaccactctcgatacattaactctctcattttctttaacaaattctgcaatatcttcgtaaaaagattcttgaaactttttagaatatctatcgactctagatgaaatagcgttcgtcaacatactatgttttgtatacataaaggcgcccattttaacagtttctagtgacaaaatgctagcgatcctaggatcctttagaatcacatagattgacgattcgtctctcttagtaactctagtaaaataatcatacaatctagtacgcgaaataatattatccttgacttgaggagatctaaacaatctagttttgagaacatcgataagttcatcgggaatgacatacatactatctttaatagaactcttttcatccagttgaatggattcgtccttaaccaactgattaatgagatcttctattttatcattttccagatgatatgtatgtccattaaagttaaattgtgtagcgcttctttttagtctagcagccaatactttaacatcactaatatcgatatacaaaggagatgatttatctatggcattaagaattcgtttttcgacatccgtcaaaaccaattcctttttgcctgtatcatccagttttccatcctttgtaaagaaattattttctactagactattaataagactgataaggattcctccataattgcacaatccaaactttttaacaaaactagactttacgagatctacaggaatgcgtacttcaggttttttagcttgtgattttttcttttgcggacattttctagtaaccaactcatctaccatttcattgattttagcagtgaaataagctttcaatgcacgggcactgatactattgaaaacgagttgatcttcaaattccgccatttaagttcaccaaacaacttttaaatacaaatatatcaatagtagtagaataagaactataaaaaaaataataattaaccaaccccaacaaccggtattattagttgatgtggtagttttctcatcacttagaacagatttaacaatttctataaagtctgtcaaatcatcttccggagaccccataaatacaccaaatatagcggcgtacaacttatccatttatacattgaatattggcttttctttatcgctatcttcatcatattcatcatcaatatcaacaagtcccagattacgagccagatcttcttctacattttcagtcattgatacacgttcactatctccagagagtccgataacgttagccaccacttctctatcaatgattagtttcttgagcgcgaaagtaatttttgtttccgttccggatctatagaagacgataggtgtgataattgccttggccaattgtctttctcttttactgagtgattctagttcaccttctatagatctgagaatggatgattctccagtcgaaacatattctaccatggatccgtttaatttgttgatgaagatggattcatccttaaatgttttctctgtaatagtttccaccgaaagactatgcaaagaatttggaatgcgttccttgtgcttaatgtttccatagacggcttctagaagttgatacaacataggactagccgcggtaacttttatttttagaaagtatccatcgcttctatcttgtttagatttatttttataaagtttagtctctccttccaacataataaaagtggaagtcatttgactagataaactatcagtaagttttatagagatagacgaacaattagcgtattgagaagcatttagtgtaacgtattcgatacattttgcattagatttactaatcgattttgcatactctataacacccgcacaagtctgtagagaatcgctagatgcagtaggtcttggtgaagtttcaactctcttcttgattaccttactcatgattaaacctaaataattgtactttgtaatataatgatatatattttcactttatctcatttgagaataaaaatgtttttgtttaaccactgcatgatgtacagatttcggaatcgcaaaccaccagtggttttattttatccttgtccaatgtgaattgaatgggagcggatgcgggtttcgtacgtagatagtacattcccgtttttagaccgagactccatccgtaaaaatgcatactcgttagtttggaataactcggatctgctatatggatattcatagattgactttgatcgatgaaggctcccctgtctgcagccatttttatgatcgtcttttgtggaatttcccaaatagttttataaactcgcttaatatcttctggaaggtttgtattctgaatggatccaccatctgccataatcctattcttgatctcatcattccataattttctctcggttaaaactctaaggagatgcggattaactacttgaaattctccagacaatactctccgagtgtaaatattactggtatacggttccaccgactcattatttcccaaaatttgagcagttgatgcagtcggcataggtgccaccaataaactatttctaagaccgtatgttctgattttatcttttagaggttcccaattccaaagatccgacggtacaacattccaaagatcatattgtagaataccgttactggcgtacgatcctacatatgtatcgtatggtccttccttctcagctagttcacaactcgcctctaatgcaccgtaataaatggtttcgaagatcttcttatttagatcttgtgcttccaggctatcaaatggataatttaagagaataaacgcgtccgctaatccttgaacaccaataccgataggtctatgtctcttattagagatttcagcttctggaataggataataattaatatctataattttattgagatttctgacaattactttgaccacatccttcagtttgagaaaatcaaatcgcccatctattacaaacatgttcaaggcaacagatgccagattacaaacggctacctcattagcatccgcatattgtattatctcagtgcaaagattactacacttgatagttcctaaattttgttgattactctttttgttacacgcatccttataaagaatgaatggagtaccagtttcaatctgagattctataatcgctttccagacgactcgagcctttattatagatttgtatctcctttctctttcgtatagtgtatacaatcgttcgaactcgtctccccaaacattgtccaatccaggacattcatccggacacatcaacgaccactctccgtcatccttcactcgtttcataaagagatcaggaatccaaagagctataaatagatctctggttctatgttcctcgtttcctgtattctttttaagatcgaggaacgccataatatcagaatgccacggttccaagtatatggccataactccaggccgtttgtttcctccctgatctatgtatctagcggtgttattataaactctcaacattggaataataccgtttgatataccattggtaccggagatatagcttccactggcacgaatattactaattgatagacctattccccctgccattttagagattaatgcgcatcgttttaacgtgtcatagataccctctatgctatcatcgatcatgttaagtagaaaacagctagacatttggtgacgactagttcccgcattaaataaggtaggagaagcgtgcgtaaaccatttttcagaaagtagattgtacgtctcaatagctgagtctatatcccattgatgaattcctactgcgacacgcattaacatgtgctgaggtctttcaacgatcttgttgtttattttcaacaagtaggatttttccaaagttttaaaaccaaaatagttgtatgaaaagtctcgttcgtaaataataaccgagttgagtttatccttatatttgttaactatatccatggtgatacttgaaataatcggagaatgtttcccatttttaggattaacatagttgaataaatcctccatcacttcactaaatagtttttttgtttccttgtgtagatttgatacggctattctggcggctagaatggcataatccggatgttgtgtagtacaagtggctgctatttcggctgccagagtgtccaattctaccgttgttactccattatatattccttgaataaccttcatagctattttaataggatctatatgatccgtgtttaagccataacataattttctaatacgagacgtgattttatcaaacatgacattttccttgtatccatttcgtttaatgacaaacatttttgttggtgtaataaaaaaattatttaacttttcattaatagggatttgacgtatgtagcgtacaaaatgattgttcctggtatatagataaagagtcctatatatttgaaaatcgttacggctcgattaaactttaatgattgcatagtgaatatatcattaggatttaactccttgactatcatggcggcgccagaaattaccatcaaaagcattaatacagttataccgatcgcagttagaacggttatagcatccaccatttatatctaaaaattagatcaaagaatatgtgacaaagtcctagttgtatactgagaattgacgaaacaatgtttcttacatatttttttcttattagtaaccgacttaatagtaggaactggaaaactagacttgattattctataagtatagatacccttccaaataatattctctttgataaaagttccagaaaatgtagaattttttaaaaagttatcttttgctattaccaagattgtgtttagacgcttattattaatatgagtgatgaaatccacaccgcctctagatatcgcctttatttccacattagatggtaaatccaatagtgaaactatctttttaggaatgtatggactcgcgtttagaggagtaaacgtcttaggcgtcggaaaggatgattcatcaaacgaataaacaatttcacaaatggatgttaatgtattagtaggaaattttttgacgctattggaattgaagattctaatggatgatgttctacctatttcatccgataacatgttaatttccgacaccaacggttttaatatttcgatgatatacggtagtctctctttcggacttatatagcttattccacaatacgagtcattatatactccaaaaaacaaaataactagtataaaatctgtatcgaatgggaaaaacgaaattatcgacataggtatagaatccggaacattgaacgtattaatacttaattctttttctgtggtaagtaccgataggttattgacattgtatggttttaaatattctataacttgagacttgatagatattagtgatgaattgaaaattatttttatcaccacgtgtgtttcaggatcatcgtcgacgcccgtcaaccaaccgaacggagtaaaataaatatcattaatatatgctctagatattagtatttttatcaatcctttgattatcatcttctcgtaggcgaatgattccatgatcaagagtgatttaagaacatcctccggagtattaatgggcttagtaaacagtccatcgttgcaataataaaagttatccaagttaaaggatattatgcattcgtttaaagatatcacctcatctgacggagacaattttttggtaggttttagagactttgaagctacttgtttaacaaagttattcatcgtcgtctactattctatttaattttgtagttaatttatcacatatcacattaattgactttttggtccacttttccatacgtttatattcttttaatcctgcgttatccgtttccgttatatccagggatagatcttgcaagttaaatagaatgctcttaaataatgtcattttcttatccgctaaaaatttaaagaatgtataaacctttttcagagatttgaaactcttaggtggtgtcctagtacacaatatcataaacaaactaataaacattccacattcagattccaacagctgattaacttccacattaatacagcctattttcgctccaaatgtacattcgaaaaatctgaataaaacatcgatgtcacaatttgtattatccaatacagaatgtttgtgattcgtgttaaaaccatcggagaaggaatagaaataaaaattattatagtggtggaattcagttggaatattgcctccggagtcataaaaggatactaaacattgttttttatcataaattacacatttccaatgagacaaataacaaaatccaaacattacaaatctagaggtagaacttttaattttgtctttaagtatatacgataagatatgtttattcataaacgcgtcaaatttttcatgaatcgctaaggagtttaagaatctcatgtcaaattgtcctatataatccacttcggatccataagcaaactgagagactaagttcttaatacttcgattgctcatccaggctcctctctcaggctctattttcatcttgacgacctttggattttcaccagtatgtattcctttacgtgataaatcatcgattttcaaatccatttgtgagaagtctatcgccttagatactttttcccgtagtcgaggtttaaaaaaatacgctaacggtatactagtaggtaactcaaagacatcatatatagaatggtaacgcgtctttaactcgtcggttaactctttcttttgatcgagttcgtcgctactattgggtctgctcaggtgccccgactctactagttccaacatcataccgataggaatacaagacactttgccggcggttgtagatttatcatatttttccactacatatccgttacaatttgttaaaaatttagatacatctatattgctacataatccagctagtgaatatatatgacataataaattggtaaatcctagttctggtattttactaattactaaatctgtatatctttccatttatcatggaaaagaatttaccagatatcttcttttttccaaactgcgttaatgtattctcttacaaatattcacaagatgaattcagtaatatgagtaaaacggaacgtgatagtttctcattggccgtgtttccagttataaaacatagatggcataacgcacacgttgtaaaacataaaggaatatacaaagttagtacagaagcacgtggaaaaaaagtatctcctccatcactaggaaaacccgcacacataaacctaaccgcgaagcaatatatatacagtgaacacacaataagctttgaatgttatagttttctaaaatgtataacaaatacagaaatcaattcgttcgatgagtatatattaagaggactattagaagctggtaatagtttacagatattttccaattccgtaggtaaacgaacagatactataggtgtactagggaataagtatccatttagcaaaattccattggcctcattaactcctaaagcacaacgagagatattttcagcgtggatttctcatagacctgtagttttaactggaggaactggagtgggtaagacgtcacaggtacccaagttattgctttggtttaattatttatttggtggattctctactctagataaaatcactgactttcacgaaagaccagtcattctatctcttcctaggatagctttagttagattgcatagcaataccattttaaaatcattgggatttaaggtactagatggatctcctatttctttacggtacggatctataccggaagaattaataaacaaacaaccaaaaaaatatggaattgtattttctacccataagttatctctaacaaaactatttagttatggcactcttattatagacgaagttcatgagcatgatcaaataggagatattattatagcagtagcgagaaagcatcatacgaaaatagattctatgtttttaatgactgccacgttagaggatgacagggaacggctaaaagtatttttacctaatcccgcatttatacatattcctggagatacactgtttaaaattagcgaggtatttattcataataagataaatccatcttccagaatggcatacatagaagaagaaaagagaaatttagttactgctatacagatgtatactcctcctgatggatcatccggtatagtctttgtggcatccgttgcacagtgtcacgaatataaatcatatttagaaaaaagattaccgtatgatatgtatattattcatggtaaggtcttagatatagacgaaatattagaaaaagtgtattcatcacctaatgtatcgataattatttctactccttatttggaatccagcgttactatacgcaatgttacacacatttatgatatgggtagagtttttgtccccgctccttttggaggatcgcaacaatttatttctaaatctatgagagatcaacgaaaaggaagagtaggaagagttaatcctggtacatacgtctatttctatgatctgtcttatatgaagtctatacagcgaatagattcagaatttctacataattatatattgtacgctaataagtttaatctaacactccccgaagatttgtttataatccctacaaatttggatattctatggcgtacaaaggaatatatagactcgttcgatattagtacagaaacatggaataaattattatccaattattatatgaagatgatagagtatgctaaactttatgtactaagtcctattctcgctgaggagttggataactttgagaggacgggagaattaactagtattgtacgagaagccattttatctctaaatttacaaattaagattttaaattttaaacataaagatgatgatacgtatatacacttttgtaaaatattattcggtgtctataacggaacaaacgctactatatattatcatagacctctaacgggatatatgaatatgatttcagatactatatttgttcctgtagataataactaaaaatcaaactctaatgaccacatctttttttagagatgaaaaattttccacatctccttttgtagacacgactaaacattttgcagaaaaaagtttattagtgtttagataatcgtatacttcatcagtgtagatagtaaatgtgaacagataaaaggtattcttgctcaatagattggtaaattccatagaatatattaatcctttcttcttgagatcccacatcatttcaaccagagacgttttatccaatgatttacctcgtactataccacatacaaaactagattttgcagtgacgtcgtacctggtattcctaccaaacaaaattttacttttagttcttttagaaaattctaaggtagaatctctatttgccaatatgtcatctatggaattaccactagcaaaaaatgatagaaatatatattgatacatcgcagctggttttgatctactatactttaaaaacgaatcagattccataattgcctgtatatcatcagctgaaaaactatgttttacacgtattccttcggcatttctttttaatgatatatcttgtttagacaatgataaagttatcatgtccatgagagacgcgtctccgtatcgtataaatatttcattagatgttagacgcttcattaggggtatacttctataaggtttcttaatcagtccatcattggttgcgtcaagaactactatcggatgttgttgggtatctctagtgttacacatggccttactaaagtttgggtaaataactatgatatctctattaattatagatgcatatatttcattcgtcaaggatattagtatcgacttgctatcgtcattaatacgtgtaatgtaatcatataaatcatgcgatagccaaggaaaatttaaatagatgttcatcatataatcgtcgctataattcatattaatacgttgacattgactaatttgtaatatagcctcgccacgaagaaagctctcgtattcagtttcatcgataaaggataccgttaaatataactggttgccgatagtctcatagtctattaagtggtaagtttcgtacaaatacagaatccctaaaatattatctaatgttggattaatctttaccataactgtataaaatggagacggagtcataactattttaccgtttgtacttactggaatagatgaaggaataatctccggacatgctggtaaagacccaaatgtctgtttgaagaaatccaatgttccaggtcctaatctcttaacaaaaattacgatattcgatcccgatatcctttgcattctatttaccagcatatcacgaactatattaagattatctatcatgtctattctcccaccgttatataaatcgcctccgctaagaaacgttagtatatccatacaatggaatacttcatttctaaaatagtattcgttttctaattctttaatgtgaaatcgtatactagaaagggaaaaattatctttgagttttccgttagaaaagaaccacgaaactaatgttctgattgcgtccgattccgttgctgaattaatggatttacaccaaaaactcatataacttctagatgtagaagcattcgctaaaaaattagtagaatcaaaggatataagtagatgttccaacaagtgagcaattcccaagatttcatctatatcattctcgaatccgaaattagaaattcccaagtagatatcctttttcatccgatcgttgatgaaaatacgaactttattcggtaagacaatcatttactaaggagtaaaataggaagtaatgttcgtatgtcgttatcatcgtataaattaaaggtgtgttttttaccattaagtgacattataattttaccaatattggaattataatataggtgtatttgcgcactcgcgacggttgatgcatcggtaaatatagctgtatctaatgttctagtcggtatttcatcatttcgctgtctaataatagcgttttctctatctgtttccattacagctgcctgaagtttattggtcggataatatgtaaaataataagaaatacatacgaataacaaaaataaaataagatataataaagatgccatttagagatctaattttgtttaacttgtccaaattcctacttacagaagatgaggaatcgttggagatagtgtcttccttatgtagaggatttgaaatatcttataatgacttgataacttactttccagataggaaataccataaatatatttataaagtatttgaacatgtagatttatcggaggaattaagtatggaattccatgatacaactctgagagatttagtctatcttagattgtacaagtattccaagtgtatacggccgtgttataaattaggagataatctaaaaggcatagttgttataaaggacaggaatatttatattagggaagcaaatgatgacttgatagaatatctcctcaaggaatacactcctcagatttatacatattctaatgagcgcgtccccataactggttcaaaattaattctttgtggattttctcaagttacatttatggcgtatacaacgtcgcatataacaacaaataaaaaggtagatgttctcgtttccaaaaaatgtatagatgaactagtcgatccaataaattatcaaatacttcaaaatttatttgataaaggaagcggaacaataaacaaaatactcaggaagatattttattcggtaacaggtggccaaactccataggtagctttttctatttcggattttagaatttccaaattcaccagcgatttatcggttttggtgaaatccaaggatttattaatgtccacaaatgccatttgttttgtctgtggattgtatttgaaaatggaaacgatgtagttagatagatgcgctgcgaagtttcctattagggttccgcgcttcacgtcacccagcatacttgaatcaccatcctttaaaaaaaatgataagatatcaacatggagtatatcatactcgaattttaattcttctactgactcactgacattttcacaaatactacaatacggtttaccgaaaataatcagtacgttcttcatttatgggtatcaaaaacttaaaatcgttactgctggaaaataaatcactgacgatattagatgataatttatacaaagtatacaatggaatatttgtggatacaatgagtatttatatagccgtcgccaattgtgtcagaaacttagaagagttaactacggtattcataaaatacgtaaacggatgggtaaaaaagggagggcatgtaaccctttttatcgatagaggaagtataaaaattaaacaagacgttagagacaagagacgtaaatattctaaattaaccaaggacagaaaaatgttagaattagaaaagtgtacatccgaaatacaaaatgttaccggatttatggaagaagaaataaaggcagaaatgcaattaaaaatcgataaactcacatttcaaatatatttatctgattctgataacataaaaatatcattgaatgagatactaacacatttcaacaataatgagaatgttacattattttattgtgatgaacgagacgcagaattcgttatgtgtctcgaggctaaaacacatttctctaccacaggagaatggccgttgataataagtaccgatcaggatactatgctatttgcatctgctgataatcatcctaagatgataaaaaacttaactcaactgtttaaatttgttccctcggcagaggataactatttagcaaaattaacggcgttagtgaatggatgtgatttctttcctggactctatggggcatctataacacccaccaacttaaacaaaatacaattgtttagtgattttacaatcgataatatagtcactagtttggcaattaaaaattattatagaaagactaactctaccgtagacgtgcgtaatattgttacgtttataaacgattacgctaatttagacgatgtctactcgtatattcctccttgtcaatgcactgttcaagaatttatattttccgcattagatgaaaaatggaatgaatttaaatcatcttatttagaaagcgtgccgttaccctgccaattaatgtacgcgttagaaccacgcaaggagattgatgtttcagaagttaaaactttatcatcttatatagatttcgaaaatactaaatcagatatcgatgttataaaatctatatcctcgatcttcggatattctaacgaaaactgtaacacgatagtattcggcatctataaggataatttactactgagtataaataattcattttactttaacgatagtctgttaataaccaatactaaaagtgataatataataaatataggttactagattaaaaatggtgttccaactcgtgtgctctacatgcggtaaagatatttctcacgaacgatataaattgattatacgaaaaaaatcattaaaggatgtactcgtcagtgtaaagaacgaatgttgtaggttaaaattatctacacaaatagaacctcaacgtaacttaacagtgcaacctctattggatataaactaatatggatccggttaattttatcaagacatatgcgcctagaggttctattatttttattaattataccatgtcattaacaagtcatttgaatccatcgatagaaaaacatgtgggtatttattatggtacgttattatcggaacacttggtagttgaatctacctatagaaaaggagttcgaatagtcccattggatagtttttttgaaggatatcttagtgcaaaagtatacatgttagagaatattcaagttatgaaaatagcagctgatacgtcattaactttattgggtattccgtatggatttggtcatgatagaatgtattgttttaaattggtagctgactgttataaaaatgccggtattgatacatcgtctaaacgaatattgggcaaagatatttttctgagccaaaacttcacagacgataatagatggataaagatatatgattctaataatttaacattttggcaaattgattaccttaaagggtgagttaatatgcataactactcctccgttgttttttccctcgttctttttcttaacgttgtttgccatcactctcataatgtaaagatattctaaaatggtaaacttttgcatatcggacgcagaaattggtataaatgttgtaattgtattatttcccgtcaatggactagtcacagctccatcagttttatatcctttagagtatttctcactcgtgtctaacattctagagcattccatgatctgtttatcgttgatattggccggaaagatagattttttattttttattatattactattggcaattgtagatataacttctggtaaatatttttctaccttttcaatctcttctattttcaagccggctatatattctgctatattgttgctagtatcaataccttttctggctaagaagtcatatgtggtattcactatatcagttttaactggtagttccattagcctttccacttctgcagaataatcagaaattggttctttaccagaaaatccagctactataataggctcaccgatgatcattggcaaaatcctatattgtaccagattaatgagagcatatttcatttccaataattctgctagttcttgagacattgatttatttgatgaatctagttggttctctagatactctaccatttctgccgcatacaataacttgttagataaaatcagggttatcaaagtgtttagcgtggctagaatagtgggcttgcatgtattaaagaatgcggtagtatgagtaaaccgttttaacgaattatatagtctccagaaatctgtggcgttacatacatgagccgaatgacatcgaagattgtccaatatttttaatagctgctctttgtccattatttctatatttgactcgcaacaattgtagataccattaatcaccgattcctttttcgatgccggacaatagcacaattgtttagctttggactctatgtattcagaattaatagatatatctctcaatacagattgcactatacattttgaaactatgtcaaaaattgtagaacgacgctgttctgcagccatttaactttaaataatttacaaaaatttaaaatgagcatccgtataaaaatcgataaactgcgccaaattgtggcatatttttcagagttcagtgaagaagtgtctataaatgtagactcgacggatgagttaatgtatatttttgccgccttgggcggatctgtaaacatttgggcaattatacctctaagtgcatcagtgttttaccgaggagccgaaaatattgtgtttaatcttcctgtgtccaaggtaaaatcgtgtttgtgtagttttcacaatgatgccatcatagatatagaacctgatctggaaaataatctagtaaaactttctagttatcatgtagtaagtgtcgattgtaacaaggaactgatgcctattaggacagatactactatttgtctaagtatagatcaaaagaaatcttacgtgtttaattttcacaagtatgaagaaaaatgttgtggtagaaccgtcattcatctagaatggttgttgggctttatcaagtgtattagtcagcatcagcatctggctattatgtttaaagatgacaatattattatgaagactcctggtaatactgatgcgttttccagggaatattctatgactgaatgttctcaagaactacaaaagttttctttcaaaatagctatctcgtctctcaacaaactacgaggattcaaaaagagagtcaatgtttttgaaactagaatcgtaatggataatgacgataacattttaggaatgttgttttcggatagagttcaatcctttaagatcaacatctttatggcgtttttagattaatactttcaatgagataaatatgggtggcggagtaagtgttgagctccctaaacgggatccgcctccgggagtacccactgatgagatgttattaaacgtggataaaatgcatgacgtgatagctcccgctaagcttttagaatatgtgcatataggaccactagcaaaagataaagaggataaagtaaagaaaagatatccagagtttagattagtcaacacaggacccggtggtctttcggcattgttaagacaatcgtataatggaaccgcacccaattgctgtcgcacttttaatcgtactcattattggaagaaggatggaaagatatcagataagtatgaagagggtgcagtattagaatcgtgttggccagacgttcacgacactggaaaatgcgatgttgatttattcgactggtgtcagggggatacgttcgatagaaacatatgccatcagtggatcggttcagcctttaataggagtaatagaactgtagagggtcaacaatcgttaataaatctgtataataagatgcaaacattatgtagtaaagatgctagtgtaccaatatgcgaatcatttttgcattatttacgcgcacacaatacagaagatagcaaagagatgatcgattatattctaagacaacagtctgcggactttaaacagaaatatatgagatgtagttatcccactagagataagttagaagagtcattaaaatatgcggaacctcgagaatgttgggatccagagtgttcgaatgccaatgttaatttcttactaacacgtaattataataatttaggactttgcaatattgtacgatgtaataccagcgtgaacaacttacagatggataaaacttcctcattaagattgtcatgtggattaagcaatagtgatagattttctactgttcccgtcaatagagcaaaagtagttcaacataatattaaacactcgttcgacctaaaattgcatttgatcagtttattatctctcttggtaatatggatactaattgtagctatttaaatgggtgccgcggcaagcatacagacgacggtgaatacactcagcgaacgtatctcgtctaaattagaacaagaagcgaacgctagtgctcaaacaaaatgtgatatagaaatcggaaatttttatatccgacaaaaccatggatgtaacctcactgttaaaaatatgtgctctgcggacgcggatgctcagttggatgctgtgttatcagccgctacagaaacatatagtggattaacaccggaacaaaaagcatacgtgccagctatgtttactgctgcgttaaacattcagacgagtgtaaacactgttgttagagattttgaaaattatgtgaaacagacttgtaattctagcgcggtcgtcgataacaaattaaagatacaaaacgtaatcatagatgaatgttacggagccccaggatctccaacaaatttggaatttattaatacaggatctagcaaaggaaattgtgccattaaagcgttgatgcaattgacgactaaggccactactcaaatagcacctagacaagttgctggtacaggagttcagttttatatgattgttatcggtgttataatattggcagcgttgtttatgtactatgccaagcgtatgttgttcacatccaccaatgataaaatcaaacttattttagccaataaggaaaacgtccattggactacttacatggacacattctttagaacttctccgatggttattgctaccacggatatgcaaaactgaaaatatattgataatattttaatagattaacatggaagttatcgctgatcgtctagacgatatagtgaaacaaaatatagcggatgaaaaatttgtagattttgttatacacggtctagagcatcaatgtcctgctatacttcgaccattaattaggttgtttattgatatactattatttgttatagtaatttatatttttacggtacgtctagtaagtagaaattatcaaatgttgttggtggtgctagtcatcacattaactattttttattactttatactataatagtactagactgacttctaacaaacatctcacctgccataaataaatgcttgatattaaagtcttctatttctaacactattccatctgtggaaaataatactctgacattatcgctaattgacacatcggtgagtgatatgcctataaagtaataatcttctttgggcacatataccagtgtaccaggttctaacaacctatttactggtgctcctgtagcatactttttctttaccttgagaatatccatcgtttgcttggtcaatagcgatatgtgattttttatcaaccactcaaaaaagtaattggagtgttcatatcctctacgggctattgtctcatggccgtgtatgaaatttaagtaacacgactgtggtagatttgttctatagagccgattgccgcaaatagatagaactaccaatatgtctgtacaaatgttaaacattaattgattaacagaaaaaacaatgttcgttctgggaatagaaaccagatcaaaacaaaattcgttagaatatatgccacgtttatacatggaatataaaataactacagtttgaaaaataacagtatcatttaaacatttaacttgcggggttaatctcacaactttactgtttttgaactgttcaaaatatagcatcgatccgtgagaaatacgtttagccgcctttaatagaggaaatcccaccgcctttctggatctcaccaacgacgatagttctgaccagcaactcatttcttcatcatccacctgttttaacatataataggcaggagatagatatccgtcattgcaatattccttctcgtaggcacacaatctaatattgataaaatctccattctcttctctgcatttattatcttgtctcggtggctgattaggctgtggtcttggtttaggccttggtctatcgttgttgaatctattttggtcattaaatctttcatttcttcctggtatatttctatcacctcgtttggttggatttttgtctatattatcgtttgtaacatcggtacgggtattcatttatcacaaaaaaaacttctctaaatgagtctactgctagaaaacctcatcgaagaagataccatattttttgcaggaagtatatctgagtatgatgatttacaaatggttattgccggcgcaaaatccaaatttccaagatctatgctttctatttttaatatagtacctagaacgatgtcaaaatatgagttggagttgattcataacgaaaatatcacaggagcaatgtttaccacaatgtataatataagaaacaatttgggtctaggagatgataaactaactattgaagccattgaaaactatttcttggatcctaacaatgaagttatgcctcttattattaataatacggatatgactgccgtcattcctaaaaaaagtggtaggagaaagaataagaacatggttatcttccgtcaaggatcatcacctatcttgtgcattttcgaaactcgtaaaaagattaatatttataaagaaaatatggaatccgcgtcgactgagtatacacctatcggagacaacaaggctttgatatctaaatatgcgggaattaatgtcctgaatgtgtattctccttccacatccataagattgaatgccatttacggattcaccaataaaaataaactagagaaacttagtactaataaggaactagaatcgtatagttctagccctcttcaagaacccattaggttaaatgattttctgggactattggaatgtgttaaaaagaatattcctctaacagatattccgacaaaggattgattactataaatggagaatgttcctaatgtatactttaatcctgtgtttatagagcccacgtttaaacattctttattaagtgtttataaacacagattaatagttttatttgaagtattcgttgtattcattctaatatatgtattttttagatctgaattaaatatgttcttcatgcctaaacgaaaaatacccgatcctattgatagattacgacgtgctaatctagcgtgtgaagacgataaattaatgatctatggattaccatggatgacaactcaaacatctgcgttatcaataaatagtaaaccgatagtgtataaagattgtgcaaagcttttgcgatcaataaatggatcacaaccagtatctcttaacgatgttcttcgcagatgatgattcattttttaagtatttggctagtcaagatgatgaatcttcattatctgatatattgcaaatcactcaatatctagactttctgttattattattgatccaatcaaaaaataaattagaagctgtgggtcattgttatgaatctctttcagaggaatacagacaattgacaaaattcacagactttcaagattttaaaaaactgtttaacaaggtccctattgttacagatggaagggtcaaacttaataaaggatatttgttcgactttgtgattagtttgatgcgattcaaaaaagaatcctctctagctaccaccgcaatagatcctgttagatacatagatcctcgtcgcaatatcgcattttctaacgtgatggatatattaaagtcgaataaagtgaacaataattaattctttattgtcatcatgaacggcggacatattcagttgataatcggccccatgttttcaggtaaaagtacagaattaattagacgagttagacgttatcaaatagctcaatataaatgcgtgactataaaatattctaacgataatagatacggaacgggactatggacgcatgataagaataattttgaagcattggaagcaactaaactatgtgatgtcttggaatcaattacagatttctccgtgataggtatcgatgaaggacagttctttccagacattgtttaattctgtgagcgtatggcaaacggtaccgagctcttttttttttttttttttttggcatataaataagtcgactccctatcagtgatagagaatgttcttggctgttttgtattgccttctgtggagtttccagatctctgatggccattttcctcgagcctgtgcctcctctaagaacttgttggcaaaagaatgctgcccaccatggatgggtgatgggagtccctgcggccagctttcaggcagaggttcctgccaggatatccttctgtccagtgcaccatctggacctcagttccccttcaaaggggtggatgaccgtgagtcctggccctctgtgttttataataggacctgccagtgctcaggcaacttcatgggtttcaactgcggaaactgtaagtttggatttgggggcccaaattgtacagagaagcgagtcttgattagaagaaacatttttgatttgagtgtctccgaaaagaataagttcttttcttacctcactttagcaaaacatactatcagctcagtctatgtcatccccacaggcacctatggccaaatgaacaatgggtcaacacccatgtttaatgatatcaacatctacgacctctttgtatggatgcattactatgtgtcaagggacacactgcttgggggctctgaaatatggagggacattgattttgcccatgaagcaccagggtttctgccttggcacagacttttcttgttattgtgggaacaagaaattcgagaactaactggggatgagaacttcactgttccatactgggattggagagatgcagaaaactgtgacatttgcacagatgagtacttgggaggtcgtcaccctgaaaatcctaacttactcagcccagcatccttcttctcctcctggcagatcatttgtagcagatcagaagagtataatagccatcaggttttatgcgatggaacacctgagggaccactattacgtaatcctggaaaccatgacaaagccaaaacccccaggctcccatcttcagcagatgtggaattttgtctgagtttgacccagtatgaatctggatcaatggatagaactgccaatttcagctttagaaacacactggaaggatttgccagtccactcacagggatagcagatccttctcaaagtagcatgcacaatgccttacatatctttatgaatggaacaatgtcccaagtacagggatcggccaacgatcccatttttcttcttcaccatgcttttgtggacagtatttttgaacaatggctgcgaaggcaccgccctcttttggaagtttacccagaagccaatgcacctatcggccataacagagactcttacatggttcctttcataccgctctatagaaatggtgatttcttcataacatccaaggatctgggatatgactacagctacctccaagagtcagatccaggcttttacagaaattatattgagccttacttggaacaagccagtcgtatctggccatggcttcttggggcagcactggtgggagctgttattgctgcagctctctctgggcttagcagtaggctatgccttcagaagaagaagaagaagaagcaaccccaggaggaaaggcagccactcctcatggacaaagacgactaccacagcttgctgtatcagagccatctgtgattaattaatttttatcgatctaattcaacaatgtctggagagctcggatccttctgtgagcgtatggcaaacgaaggaaaaatagttatagtagccgcactcgatgggacatttcaacgtaaaccgtttaataatattttgaatcttattccattatctgaaatggtggtaaaactaactgctgtgtgtatgaaatgctttaaggaggcttccttttctaaacgattgggtgaggaaaccgagatagaaataataggaggtaatgatatgtatcaatcggtgtgtagaaagtgttacatcgactcataatattatattttttatctaaaaaactaaaaataaacattgattaaattttaatataatacttaaaaatggatgttgtgtcgttagataaaccgtttatgtattttgaggaaattgataatgagttagattacgaaccagaaagtgcaaatgaggtcgcaaaaaaactgccgtatcaaggacagttaaaactattactaggagaattattttttcttagtaagttacagcgacacggtatattagatggtgccaccgtagtgtatataggatctgctcccggtacacatatacgttatttgagagatcatttctataatttaggagtgatcatcaaatggatgctaattgacggccgccatcatgatcctattttaaatggattgcgtgatgtgactctagtgactcggttcgttgatgaggaatatctacgatccatcaaaaaacaactgcatccttctaagattattttaatttctgatgtgagatccaaacgaggaggaaatgaacctagtacggcggatttactaagtaattacgctctacaaaatgtcatgattagtattttaaaccccgtggcgtctagtcttaaatggagatgcccgtttccagatcaatggatcaaggacttttatatcccacacggtaataaaatgttacaaccttttgctccttcatattcagctgaaatgagattattaagtatttataccggtgagaacatgagactgactcgagttaccaaattagacgctgtaaattatgaaaaaaagatgtactaccttaataagatcgtccgtaacaaagtagttgttaactttgattatcctaatcaggaatatgactattttcacatgtactttatgctgaggaccgtgtactgcaataaaacatttcctactactaaagcaaaggtactatttctacaacaatctatatttcgtttcttaaatattccaacaacatcaactgaaaaagttagtcatgaaccaatacaacgtaaaatatctagcaaaaattctatgtctaaaaacagaaatagcaagagatccgtacgcggtaataaatagaaacgtactactgagatatactaccgatatagagtataatgatttagttactttaataaccgttagacataaaattgattctatgaaaactgtgtttcaggtatttaacgaatcatccataaattatactccggttgatgatgattatggagaaccaatcattataacatcgtatcttcaaaaaggtcataacaagtttcctgtaaattttctatacatagatgtggtaatatctgacttatttcctagctttgttagactagatactacagaaactaatatagttaatagtgtactacaaacaggcgatggtaaaaagactcttcgtcttcccaaaatgttagagacggaaatagttgtcaagattctctatcgccctaatataccattaaaaattgttagatttttccgcaataacatggtaactggagtagagatagccgatagatctgttatttcagtcgctgattaatcaattagtagagatgagataagaacattataataatcaataatatatcttatatcttatatcttatatcttatatcttgtttagaaaaatgctaatattaaaatagctaacgctagtaatccaatcggaagccatttgatatctataatagggtatctaatttcctgatttaaatagcggacagctatattctcggtagctactcgtttggaatcacaaacattatttacatctaatttactatctgtaatggaaacgtttcccaatgaaatggtacaatccgatacattgcattttgttatatttttttttaaagaggctggtaacaacgcatcgcttcgtttacatggctcgtaccaacaataatagggtaatcttgtatctattcctatccgtactatgcttttatcaggataaatacatttacatcgtatatcgtctttgttagcatcacagaatgcataaatttgttcgtccgtcatgataaaaatttaaagtgtaaatataactattatttttatagttgtaataaaaagggaaatttgattgtatactttcggttctttaaaagaaactgacttgataaaaatggctgtaatctctaaggttacgtatagtctatatgatcaaaaagagattaatgctacagatattatcattagtcatgttaaaaatgacgacgatatcggtaccgttaaagatggtagactaggtgctatggatggggcattatgtaagacttgtgggaaaacggaattggaatgtttcggtcactggggtaaagtaagtatttataaaactcatatagttaagcctgaatttatttcagaaattattcgtttactgaatcatatatgtattcactgcggattattgcgttcacgagaaccgtattccgacgatattaacctaaaagagttatcgggacacgctcttaggagattaaaggataaaatattatccaagaaaaagtcatgttggaacagtgaatgtatgcaaccgtatcaaaaaattactttttcaaagaaaaaggtttgtttcgtcaacaagttggatgatattaacgttcctaattctctcatctatcaaaagttaatttctattcatgaaaagttttggccattattagaaattcatcaatatccagctaacttattttatacagactactttcccatccctccgttgattattagaccggctattagtttttggatagatagtatacccaaagagaccaatgaattaacttacttattaggtatgatcgttaagaattgtaacttgaatgctgatgaacaggttatccagaaggcggtaatagaatacgatgatattaaaattatttctaataacactaccagtatcaatttatcatatattacatccggcaaaaataatatgattagaagttatatcgtcgcccgacgaaaagatcagaccgctagatctgtaattggtcccagtacatctatcaccgttaatgaggtaggaatgcccgcatatattagaaatacacttacagaaaagatatttgttaatgcctttacagtggataaagttaaacaactattagcgtcaaaccaagttaaattttactttaataaacgattaaaccaattaacaagaatacgccaaggaaagtttattaaaaataaaatacatttattgcctggtgattgggtagaagtagctgttcaagaatatacaagtattatttttggaagacagccgtctctacatagatacaacgtcatcgcttcatctatcagagctaccgaaggagatactatcaaaatatctcccggaattgccaactctcaaaatgctgatttcgacggggatgaggaatggatgatattagaacaaaatcctaaagctgtaattgaacaaagtattcttatgtatccgacgacgttactcaaacacgatattcatggagcccccgtttatggatctattcaagatgaaatcgtagcagcgtattcattgtttaggatacaagatctttgtttagatgaagtattgaacatcttggggaaatatggaagagagttcgatcctaaaggtaaatgtaaattcagcggtaaagatatctatacttacttgataggtgaaaagattaattatccgggtctcttaaaggatggtgaaattattgcaaacgacgtagatagtaattttgttgtggctatgaggcatctgtcattggctggactcttatccgatcataagtcgaacgtggaaggtatcaactttattatcaagtcatcttatgtttttaagagatatctatctatttacggttttggggtgacattcaaagatctgagaccaaattcgacgttcactaataaattggaggccatcaacgtagaaaaaatagaacttatcaaagaagcatacgccaaatatctcaacgatgtaagagacgggaaaatagttccattatctaaagctttagaggcggactatgtggaatccatgttatccaacttgacaaatcttaatatccgagagatagaagaacatatgagacaaacgctgatagatgatccagataataacctcctgaaaatggccaaagcgggttataaagtaaatcccacagaactaatgtatattctaggtacgtatggacaacaaaggattgatggtgaaccagcagagactcgagtattgggtagagttttaccttactatcttccagactctaaggatccagaaggaagaggttacattcttaattctttaacaaaaggattaacgggttctcaatattacttttcgatgctggttgccagatctcaatctactgatatcgtctgtgaaacatcacgtaccggaacactggctagaaaaatcattaaaaagatggaggatatggtggtcgacggatacggacaagtagttataggtaatacgctcatcaagtacgccgccaattataccaaaattctaggctcagtatgtaaacctgtagatcttatctatccagatgagtccatgacttggtatttggaaattagtgctctgtggaataaaataaaacagggattcgtttactctcagaaacagaaacttgcaaagaagacattggcgccgtttaatttcctagtattcgtcaaacccaccactgaggataatgctattaaggttaaggatctgtacgatatgattcataacgtcattgatgatgtgagagagaaatacttctttacggtatctaatatagattttatggagtatatattcttgacgcatcttaatccttctagaattagaattacaaaagaaacggctatcactatctttgaaaagttctatgaaaaactcaattatactctaggtggtggaactcctattggaattatttctgcacaggtattgtctgagaagtttacacaacaagccctgtccagttttcacactactgaaaaaagtggtgccgtcaaacaaaaacttggtttcaacgagtttaataacttgactaatttgagtaagaataagaccgaaattatcactctggtatccgatgatatctctaaacttcaatctgttaagattaatttcgaatttgtatgtttgggagaattaaatccaaacatcactcttcgaaaagaaacagataaatatgtagtagatataatagtcaatagattatacatcaagagagcagaaataaccgaattagtcgtcgaatatatgattgaacgatttatctcctttagcgtcattgtaaaggaatggggtatggagacattcattgaggacgaggataatattagatttactgtctacctaaatttcgttgaaccggaagaattgaatcttagtaagtttatgatggttcttccgggggcagccaacaagggaaagattagtaaattcaagattcctatctctgattatacgggatatgacgacttcaatcaaacaaaaaagctcaataagatgactgtagaactcatgaatctaaaagaattgggttctttcgatttggaaaacgtcaacgtgtatcctggagtatggaatacatacgatatcttcggtatcgaggccgctcgtgaatacttgtgcgaagccatgttaaacacctatggagaagggttcgattatctgtatcagccttgtgatcttctcgctagtttactatgtgctagttacgaaccagaatcagtgaataaattcaagttcggcgcagctagtactcttaagagagctacgttcggagacaataaagcattgttaaacgcggctcttcataaaaagtcagaacctattaacgataatagtagctgccacttttttagcaaggtccctaatataggaactggatattacaaatactttatcgacttgggtcttctcatgagaatggaaaggaaactatctgataagatatcttctcaaaagatcaaggaaatggaagaaacagaagacttttaattcttatcaataacatatttttctatgatctgtcttttaaacgatggattttccacaaatgcgcctctcaagtccctcatagaatgatacacgtataaaaaatatagcataggcaatgactccttatttttagacattagatatgccaaaatcatagccccgcttctatttactcccgcagcacaatgaaccaacacgggctcgtttcgttgatcacatttagataaaaaggcggttacgtcgtcaaaatatttactaatatcggtagttgtatcatctaccaacggtatatgaataatattaatattagagttaggtaatgtatatttatccatcgtcaaatttaaaacatatttgaacttaacttcagatgatggtgcatccatagcatttttataatttcccaaatacacattattggttacccttgtcattatagtgggagatttggctttgtgcatatctccagttgaacgtagtagtaagtatttatacaaacttttcttatccatttataacgtacaaatggataaaactactttatcggtaaacgcgtgtaatttagaatacgttagagaaaaggctatagtaggcgtacaagcagccaaaacatcaacacttatattctttgttattatattggcaattagtgcgctattactctggtttcagacgtctgataatccagtctttaatgaattaacgagatatatgcgaattaaaaatacggttaacgattggaaatcattaacggatagcaaaacaaaattagaaagtgatagaggtagacttctagccgctggtaaggatgatatatttgaattcaaatgtgtggatttcggcgcctattttatagctatgcgattggataagaaaacatatctgccgcaagctattaggcgaggtactggagacgcgtggatggttaaaaaggcggcaaaggtcgatccatctgctcaacaattttgtcagtatttgataaaacacaagtctaataatgttattacttgtggtaatgagatgttaaatgaattaggttatagcggttattttatgtcaccgcattggtgttccgattttagtaatatggaatagtgttagataaatgcggtaacgaatgttcctgtaaggaaccataacagcttagatttaacgttaaagatgagcataaacataataaacaaaattacaatcaaacttataacattaatatcaaacaatccaaaaaatgaaatcagtggagtagtaaacgcgtacataactcctggataacgtttagcagctgccgttcctattctagaccaaaaattcggtttcatgttttcgaaacggtattctgcaacaagtcgaggatcgtgttctacatatttggcggcattatccagtatctgcctattgatcttcatttcgttttcgattctggctatttcaaaataaaatcccgatgatagacctccagactttataatttcatctacgatgttcagcgccgtagtaactctaataatataggctgataagctaacatcataccctcctgtatatgtgaatatggcatgatttttgtccattacaagctcggttttaactttattgcctgtaataatttctctcatctgtaggatatctatttttttgtcatgcattgccttcaagacgggacgaagaaacgtaatatcctcaataacgttatcgttttctacaataactacatattctacctttttattttctaactcggtaaaaaaattagaatcccatagggctaaatgtctagcgatatttcttttcgtttcctctgtacacatagtgttacaaaaccctgaaaagaagtgagtatacttgtcatcatttctaatgtttcctccagtccactgtataaacgcataatccttgtaatgatctggatcatccttgactaccacaacatttcttttttctggcataacttcgttgtcctttacatcatcgaacttctgatcattaatatgctcatgaacattaggaaatgtttctgatggaggtctatcaataactggcacaacaataacaggagttttcaccgccgccatttagttattgaaattaatcatatacaactctttaatacgagttatattttcgtctatccattgtttcacattgacatatttcgacaaaaagatataaaatgcgtattccaatgcttctctgtttaatgaattactaaaatatacaaacacgtcactgtctggcaataaatgatatcttagaatattgtaacaatttattttgtattgcacatgttcgtgatctatgagttcttcttcgaatggcataggatctccgaatctgaaaacgtataaataggagttagaataataatatttgagagtattggtaatatataaactctttagcggtataattagtttttttctctcaatttctatttttagatgtgatggaaaaatgactaattttgtagcattagtatcatgaactctaatcaaaatcttaatatcttcgtcacacgttagctctttgaagtttttaagagatgcatcagttggttctacagatggagtaggtgcaacaattttttgttctacacatgtatgtactggagccattgttttaactataatggtgcttgtatcgaaaaactttaatgcagatagcggaagctcttcgccgcgactttctacgtcgtaattgggttctaacgccgatctctgaatggatactagttttctaagttctaatgtgattctctgaaaatgtaaatccaattcctccggcattatagatgtgtatacatcggtaaataaaactatagtatccaacgatcccttctcgcaaattctagtcttaaccaaaaaatcgtatataaccacggagatggcgtatttaagagtggattcttctaccgttttgttcttggatgtcatataggaaactataaagtccgcactactgttaagaatgattactaacgcaactatatagtttaaattaagcattttggaaacataaaataactctgtagacgatacttgactttcgaataagtttgcagacaaacgaagaaagaacagacctctcttaatttcagaagaaaactttttttcgtattcctgacgtctagagtttatatcaataagaaagttaagaattagtcggttaatgttgtatttcattacccaagtttgagatttcataatattatcaaaagacatgataatattaaagataaagcgctgactatgaacgaaatagctatatggttcgctcaagaatatagtcttgttaaacgtggaaacgataactgtatttttaatcacgtcagcggcatctaaattaaatataggtatatttattccacacactctacaatatgccacaccatcttcataataaataaattcgttagcaaaattattaattttagtgaaatagttagcgtcaactttcatagcttccttcaatctaatttgatgctcacacggtgcgaattccactctaacatcccttttccatgcctcaggttcatcgatctctataatatctagttttttgcgtttcacaaacacaggctcgtctctcgcgatgagatctgtatagtaactatgtaaatgataactagatagaaagatgtagctatatagatgacgatcctttaagagaggtataataactttaccccaatcagatagactgttgttatggtcttcggaaaaagaatttttataaatttttccagtattttccaaatatacgtacttaacatctaaaaaatccttaatgataataggaatggataatccgtctattttataaagaaatacatatcgcacattatacttttttttggaaatgggaataccgatgtgtctacataaatatgcaaagtctaaatattttttagagaatcttagttggtccaaattcttttccaagtacggtaatagatttttcatattgaacggtatcttcttaatctctggttctagttccgcattaaatgatgaaactaagtcactatttttataactaacgattacatcacctctaacatcatcatttaccagaatactgatcttcttttgtcgtaaatacatgtctaatgtgttaaaaaaaagatcatacaagttatacgtcatttcatctgtggtattcttgtcattgaaggataaactcgtactaatctcttctttaacagcctgttcaaatttatatcctatatacgaaaaaatagcaaccagtgtttgatcatccgcgtcaatattctgttctatcgtagtgtataacaatcgtatatcttcttctgtgatagtcgatacgttataaaggttgataacgaaaatatttttatttcgtgaaataaagtcatcgtaggattttggacttatattcgcgtctagtagatatgcttttatttttggaatgatctcaattagaatagtctctttagagtccatttaaagttacaaacaactaggaaattggtttatgatgtataatttttttagtttttatagattctttattctatacttaaaaaatgaaaataaatacaaaggttcttgagggttgtgttaaattgaaagcgagaaataatcataaattatttcattatcgcgatatccgttaagtttgtatcgtaatggcgtggtcaattacgaataaagcggatactagtagcttcacaaagatggctgaaatcagagctcatctaaaaaatagcgctgaaaataaagataaaaacgaggatattttcccggaagatgtaataattccatctactaagcccaaaaccaaacgagccactactcctcgtaaaccagcggctactaaaagatcaaccaaaaaggaggaagtggaagaagaagtagttatagaggaatatcatcaaacaactgaaaaaaattctccatctcctggagtcagcgacattgtagaaagcgtggccgctgtagagctcgatgatagcgacggggatgatgaacctatggtacaagttgaagctggtaaagtaaatcatagtgctagaagcgatctctctgacctaaaggtggctaccgacaatatcgttaaagatcttaagaaaattattactagaatctctgcagtatcgacggttctagaggatgttcaagcagctggtatctctagacaatttacttctatgactaaagctattacaacactatctgatctagtcaccgagggaaaatctaaagttgttcgtaaaaaagttaaaacttgtaagaagtaaatgcgtgcacttttttataaagatggtaaactctttaccgataataattttttaaatcctgtatcagacgataatccagcgtatgaggttttgcaacatgttaaaattcctactcatttaacagatgtagtagtatatgaacaaacgtgggaggaggcgttaactagattaatttttgtgggaagtgattcaaaaggacgtagacaatacttttacggaaaaatgcatgtacagaatcgcaacgctaaaagagatcgtatttttgttagagtatataacgttatgaaacgaattaattgttttataaacaaaaatataaagaaatcgtccacagattccaattatcagttggcggtttttatgttaatggaaactatgttttttattagatttggtaaaatgaaatatcttaaggagaatgaaacagtagggttattaacactaaaaaataaacacatagaaataagtcccgatgaaatagttatcaagtttgtaggaaaggacaaagtttcacatgaatttgttgttcataagtctaatagactatataaaccgctattgaaactgacggatgattctagtcccgaagaatttctgttcaacaaactaagtgaacgaaaggtatacgaatgtatcaaacagtttggtattagaatcaaggatctccgaacgtatggagtcaattatacgtttttatataatttttggacaaatgtaaagtccatatctcctcttccgtcaccaaaaaagttaatagcattaactatcaaacaaactgctgaagtggtaggtcatactccatcaatttcaaaaagagcttatatggcaacgactattttagaaatggtaaaggataaaaattttttagatgtagtatctaaaactacgttcgatgaattcctatctatagtcgtagatcacgttaaatcatctacggatggatgatatagatctttacacaaataattacaagaccgataaatggaaatggataagcgtatgaaatctctcgcaatgacagctttcttcggagagctaagcacattagatattatggcattgataatgtctatatttaaacgccatccaaacaataccattttttcagtggataaggatggtcagtttatgattgatttcgaatacgataattataaggcttctcaatatttggatctgaccctcactccgatatctggagatgaatgcaagactcacgcatcgagtatagccgaacaattggcgtgtgcggatattattaaagaggatattagcgaatatatcaaaactactccccgtcttaaacgatttataaaaaaataccgcaatagatcagatactcgtatcagtcgagatacagaaaagcttaaaatagctctagctaaaggcatagattacgaatatataaaagacgcttgttaataagtaaatgaaaaaaaactagtcgtttataataaaacacgatatggatgccaacgtagtatcattttctactattgcgacgtatatagacgctttagcgaagaatgcttcggaattagaacagaggtctaccgcatacgaaataaataatgaattggaactagtatttattaagccgccattgattactttgacaaatgtagtgaatatctctacgattcaggaatcgtttattcgatttaccgttactaataaggaaggtgttaaaattagaactaagattccattatctaaggtacatggtctagatgtaaaaaatgtacagttagtagatgctatagataacatagtttgggaaaagaaatcattagtgacggaaaatcgtcttcacaaagaatgcttgttgagactatcgacagaggaacgtcatatatttttggattacaagaaatatggatcctctatccgactagaattagtcaatcttattcaagcaaaaacaaaaaactttacgatagactttaagctaaaatattttctaggatccggtgcccagtctaaaagttctttgttgcacgctattaatcatccaaagtcaaggcctaatacatctctggaaatagaattcacacctagagacaatgaaacagttccatatgatgaactaataaaggaattgacgactctctcgcgtcatatatttatggcttctccagagaatgtaattctttctccgcctattaacgcgcctataaaaacctttatgttgcctaaacaagatatagtaggtttggatctggaaaatctatatgccgtaactaagactgacggcattcctataactatcagagttacatcaaacgggttgtattgttattttacacatcttggttatattattagatatcctgttaagagaataatagattccgaagtagtagtctttggtgaggcagttaaggataagaactggaccgtatatctcattaagctaatagagcctgtgaatgcaatcaatgatagactagaagaaagtaagtatgttgaatctaaactagtggatatttgtgatcggatagtattcaagtcaaagaaatacgaaggtccgtttactacaactagtgaagtcgtcgatatgttatctacatatttaccaaagcaaccagaaggtgttattctgttctattcaaagggacctaaatctaacattgattttaaaattaaaaaggaaaatactatagaccaaactgcaaatgtagtatttaggtacatgtccagtgaaccaattatctttggagaatcgtctatctttgtagagtataagaaatttagcaacgataaaggctttcctaaagaatatggttctggtaagattgtgttatataacggcgttaattatctaaataatatctattgtttggaatatattaatacacataatgaagtgggtattaagtccgtggttgtacctattaagtttatagcagaattcttagttaatggagaaatacttaaacctagaattgataaaaccatgaaatatattaactcagaagattattatggaaatcaacataatatcatagtcgaacatttaagagatcaaagcatcaaaataggagatatctttaacgaggataaactatcggatgtgggacatcaatacgccaataatgataaatttagattaaatccagaagttagttattttacgaataaacgaactagaggaccgttgggaattttatcaaactacgtcaagactcttcttatttctatgtattgttccaaaacatttttagacgattccaacaaacgaaaggtattggcgattgattttggaaacggtgctgacctggaaaaatacttttatggagagattgcgttattggtagcgacggatccggatgctgatgctatagctagaggaaatgaaagatacaacaaattaaactctggaattaaaaccaagtactacaaatttgactacattcaggaaactattcgatccgatacatttgtctctagtgtcagagaagtattctattttggaaagtttaatatcatcgactggcagtttgctatccattattcttttcatccgagacattatgctaccgtcatgaataacttatccgaactaactgcttctggaggcaaggtattaatcactaccatggacggagacaaattatcaaaattaacagataaaaagacttttataattcataagaatttacctagtagcgaaaactatatgtctgtagaaaaaatagctgatgatagaatagtggtatataatccatcaacaatgtctactccaatgactgaatacattatcaaaaagaacgatatagtcagagtgtttaacgaatacggatttgttcttgtagataacgttgatttcgctacaattatagaacgaagtaaaaagtttattaatggcgcatctacaatggaagatagaccgtctacaaaaaactttttcgaactaaatagaggagccattaaatgtgaaggtttagatgtcgaagacttacttagttactatgttgtttatgtcttttctaagcggtaaataataatatggtatgggttctgatctcccagttctaaatgcattaaataattccaatagagcgatttttgttcctataggaccttccaactgtggatactctgtattgttaatagatatattaatacttttgtcgggtaacagaggttctacgtcttctaaaaataaaagttttataacatctggcctgttcataaataaaaacttggcgattctatatatactcttattatcaaatctagccattgtcttatagatgtgagctactgtaggtgtaccatttgattttctttctaatactatatatttctctcgaagaagttcttgcacatcatctgggaataaaatactactgttgagtaaatcagttattttttttatatcgatattgatggacatttttatagttaaggataataagtatcccaaagtcgataacgacgataacgaagtatttatacttttaggaaatcacaatgactttatcagattaaaattaacaaaattaaaggagcatgtatttttttctgaatatattgtgactccagatacatatggatctttatgcgtcgaattaaatgggtctagttttcagcacggcggtagatatatagaggtggaggaatttatagatgctggaagacaagttagatggtgttctacatccaatcatatatctaaagatatacccgaagatatgcacactgataaatttgtcatttatgatatttatacgtttgattcgttcaagaataaacgattggtattcgtacaggtacctccgtcgttaggagatgatagtcatttgactaatccgttattgtcaccgtattatcgtaattcagtagccagacaaatggtcaatgatatgatttttaatcaagattcatttttaaaatatttattagaacatctgattagaagccactatagagtttctaaacatataacaatagttagatacaaggataccgaagaattaaatctaacgagaatatgttataatagagataagtttaaggcgtttgtattcgcttggtttaacggcgtttcggaaaatgaaaaggtactagatacgtataaaaaggtatctaatttgatataatgaattcagtgactgtatcacacgcgccatatactattacttatcacgatgattgggaaccagtaatgagtcaattggtagagttttataacgaagtagccagttggctgctacgagacgagacgtcgcctattcctgataagttctttatacagttgaaacaaccgcttagaaataaacgagtatgtgtgtgtggtatagatccgtatccgaaagatggaactggtgtaccgttcgaatcaccaaattttacaaaaaaatcaattaaggagatagcttcatctatatctagattaaccggagtaattgattataaaggttataaccttaatataatagacggggttataccctggaattattacttaagttgtaaattaggagaaacaaaaagtcacgcgatttactgggataagatttccaagttactgctgcagcatataactaaacacgttagtgttctttattgtttgggtaaaacagatttctcgaatatacgggccaagttagaatccccggtaactaccatagtcggatatcatccagcggctagagaccgccaattcgagaaagatagatcatttgaaattatcaacgttttactggaattagacaacaaggcacctataaattgggctcaagggtttatttattaatgctttagtgaaattttaacttgtgttctaaatggatgcggctattagaggtaatgatgttatctttgttcttaagactataggtgtcccgtcagcgtgcagacaaaatgaagatccaagatttgtagaagcatttaaatgcgacgagttagaaagatatattgagaataatccagaatgtacactattcgaaagtcttagggatgaggaagcatactctatagtcagaattttcatggatgtagatttagacgcgtgtctagacgaaatagattatttaacggccattcaagattttattatcgaggtgtcaaactgtgtagctagattcgcgtttacagaatgcggcgccattcatgaaaatgtaataaaatccatgagatctaatttttcattgactaagtctacaaatagagataaaacaagttttcatattatctttttagatacgtataccactatggatacattgatagctatgaaacgaacactattagaattaagtagatcatctgaaaatccactaaccagatcgatagacactgccgtatataggagaaaaacaactcttcgggttgtaggtactaggaaaaatccaaattgcgacactattcatgtaatgcaaccaccgcatgataatatagaagattacctattcacttacgtggatatgaacaacaatagttattacttttctctacaacaacgattggaggatttagttcctgataagttatgggaaccagggtttatttcattcgaagacgctataaaaagagtttcaaaaatattcattaattctataataaactttaatgatctcgatgaaaataattttacaacggtaccactggtcatagattacgtaacaccttgtgcattatgtaaaaaacgatcgcataaacatccgcatcaactatcgttggaaaatggtgctattagaatttacaaaactggtaatccacatagttgtaaagttaaaattgttccgttggatggtaataaactgtttaatattgcacaaagaattttagacactaactctgttttattaaccgaacgaggagaccatatagtttggattaataattcatggaaatttaacagcgaagaacccttgataacaaaactaattttgtcaataagacatcaactacctaaggaatattcaagcgaattactctgtccaagaaaacgaaagactgtagaagctaacatacgagacatgttagtagattcagtggagaccgatacctatccggataaacttccgtttaaaaatggtgtattggacctggtagacggaatgttttactctggagatgatgctaaaaaatatacgtgtactgtatcaaccggatttaaatttgacgatacaaagttcgtcgaagacagtccagaaatggaagagttaatgaatatcattaacgatatccaaccattaacggatgaaaataagaaaaatagagagctatatgaaaaaacattatctagttgtttatgcggtgctaccaaaggatgtttaacattcttttttggagaaactgcaactggaaagtcgacaaccaaacgtttgttaaagtctgctatcggtgacctgtttgttgagacgggtcaaacaattttaacagatgtattggataaaggacctaatccatttatcgctaacatgcatttgaaaagatctgtattctgtagcgaactacctgattttgcctgtagtggatcaaagaaaattagatctgacaatattaaaaagttgacagaaccttgtgtcattggaagaccgtgtttctccaataaaattaataatagaaaccatgcgacaatcattatcgatactaattacaaacctgtttttgataggatagataacgcattaatgagaagaattgccgtcgtgcgattcagaacacacttttctcaaccttctggtagagaggctgctgaaaataatgacgcgtacgataaagtcaaactattagacgaggggttagatggtaaaatacaaaataatatatatagatttgcatttctatacttgttggtgaaatggtacaaaaaatatcatgttcctattatgaaactatatcctacacccgaagagattcctgactttgcattctatctcaaaataggtactctgttggtatctagctctgtaaagcatattccattaatgacggacctctccaaaaagggatatatattgtacgataatgtggtcactcttccgttgactactttccaacagaaaatatccaagtattttaattctagactatttggacacgatatagagagcttcatcaatagacataagaaatttgccaatgttagtgatgaatatctgcaatatatattcatagaggatatttcatctccgtaaatatatgctcatatatttatagaagatatcacatatctaaatgaataccggaatcatagatttatttgataatcatgttgatagtataccaactatattacctcatcagttagctactctagattatctagttagaactatcatagatgagaacagaagcgtgttattgttccatattatgggatcaggtaaaacaataatcgctttgttgttcgccttggtagcttccagatttaaaaaggtttacattctagtgccgaacatcaacatcttaaaaattttcaattataatatgggtgtagctatgaacttgtttaatgacgaattcatagctgagaatatctttattcattccacaacaagtttttattctcttaattataacgataacgtcattaattataacggattatctcgctacaataactctatttttatcgttgatgaggcacataatatctttgggaataatactggagaacttatgaccgtgataaaaaataaaaacaagattccttttttactattgtctggatctcccattactaacacacctaatactctgggtcatattatagatttaatgtccgaagagacgatagattttggtgaaattattagtcgtggtaagaaagtaattcagacacttcttaacgaacgcggtgtgaatgtacttaaggatttgcttaaaggaagaatatcatattacgaaatgcctgataaagatctaccaacgataagatatcacggacgtaagtttctagatactagagtagtatattgtcacatgtctaaacttcaagagagagattatatgattactagacgacagctatgttatcatgaaatgtttgataaaaatatgtataacgtgtcaatggcagtattgggacaacttaatctgatgaataatttagatactttatttcaggaacaggataaggaattgtacccaaatctgaaaataaataatggcgtgttatacggagaagaattggtaacgttaaacattagttccaaatttaaatactttattaatcggatacagacactcaacggaaaacattttatatacttttctaattctacatatggcggattggtaattaaatatatcatgctcagtaatggatattctgaatataatggttctcagggaactaatccacatatgataaacggcaaaccaaaaacatttgctatcgttactagtaaaatgaaatcgtctttagaggatctattagatgtgtataattctcctgaaaacgatgatggtagtcaattgatgtttttgttttcatcaaacattatgtccgaatcctatactctaaaagaggtaaggcatatttggtttatgactatcccagatactttttctcaatacaaccaaattcttggacgatctattagaaaattctcttacgccgatatttctgaaccagttaatgtatatcttttagccgccgtatattccgatttcaatgacgaagtgacgtcattaaacgattacacacaggatgaattaattaatgttttaccatttgacatcaaaaagctgttgtatctaaaatttaagacgaaagaaacgaatagaatatactctattcttcaagagatgtctgaaacgtattctcttccaccacatccatcaattgtaaaagttttattgggagaattggtcagacaatttttttataataattctcgtattaagtataacgataccaagttacttaaaatggttacatcagttataaaaaataaagaagacgctaggaattacatagatgatattgtaaacggtcacttctttgtatcgaataaagtatttgataaatctcttttatacaaatacgaaaacgatattattacagtaccgtttagactttcctacgaaccatttgtttggggagttaactttcgtaaagaatataacgtggtatcttctccataaaactgatgagatatataaagaaataaatgtcgagctttgttaccaatggatacctttccgttacattggaaccacacgagctgacgttagacataaaaactaatattaggaatgccgtatataagacgtatctccatagagaaattagtggtaaaatggccaagaaaatagaaattcgtgaagacgtggaattacctctcggcgaaatagttaataattctgtagttataaacgttccgtgtgtaataacctacgcgtattatcacgttggggatatagtcagaggaacattaaacatcgaagatgaatcaaatgtaactattcaatgtggagatttaatctgtaaactaagtagagattcgggtactgtatcatttagcgattcaaagtactgcttttttcgaaatggtaatgcgtatgacaatggcagcgaagtcactgccgttctaatggaggctcaacaaggtatcgaatctagttttgtttttctcgcgaatatcgtcgactcataaaaaagagaatagcggtaagtataaacacgaatactatggcaataattgcgaatgttttattctcttcgatatatttttgataatatgaaaaacatgtctctctcaaatcggacaaccatctcataaaatagttctcgcgcgctggagaggtagttgccgctcgtataatctctccagaataatatacttgcgtgtcgtcgttcaatttatacggatttctatagttctctgttatataatgcggtttgccctcatgattagacgacgacaatagtgttctaaatttagatagttgatcagaatgaatgtttattggcgttggaaaaattatccatacagcgtctgcagagtggttgatagttgttcctagatatgtaaaataatccaacttactaggcagcaaattgtctagataaaatactgaatcaaacggtgcagacgtattggcggatctaatggaatccaattgattaactatcttttgaaaatatacatttttatgatccaatacttgtaagaatatagaaataatgataagtccatcatcgtgtttttttgcctcttcataagaactatattttttcttattccaatgaacaagattaatctctccagagtatttgtacacatctatcaagtgattggatccataatcgtcttcctttccccaatatatatgtagtgatgataacacatattcattggggagaaaccctccacttatatatcctcctttaaaattaatccttactagttttccagtgttctggatagtggttggtttcgactcattataatgtatgtctaacggcttcaatcgcgcgttagaaattgcttttttagtttctatattaataggagatagttgttgcggcatagtaaaaatgaaatgataactgtttaaaaatagctcttagtatgggaattacaatggatgaggaagtgatatttgaaactcctagagaattaatatctattaaacgaataaaagatattccaagatcaaaagacacgcatgtgtttgctgcgtgtataacaagtgacggatatccgttaataggagctagaagaacttcattcgcgttccaggcgatattatctcaacaaaattcagattctatctttagagtatccactaaactattacggtttatgtactacaatgaactaagagaaatctttagacggttgagaaaaggttctatcaacaatatcgatcctcactttgaagagttaatattattgggtggtaaactagataaaaaggaatctattaaagattgtttaagaagagaattaaaagaggaaagtgatgaacgtataacagtaaaagaatttggaaatgtaattctaaaacttacaacacgggataaattatttaataaagtatatataagttattgcatggcgtgttttattaatcaatcgttggaggatttatcgcatactagtatttacaatgtagaaattagaaagattaaatcattaaatgattgtattaacgacgataaatacgaatatctgtcttatatttataatatgctagttaatagtaaatgaacttttacagatctagtataattagtcagattattaagtataatagacgactagctaagtctattatttgcgaggatgactctcaaattattacactcacggcattcgttaaccaatgcctatggtgtcataaacgagtatccgtgtccgctattttattaactactgataacaaaatattagtatgtaacagacgagatagttttctctattctgaaataattagaactagaaacatgtttagaaagaaacgattatttctgaattattccaattatttgaacaaacaggaaagaagtatactatcgtcatttttttctctagatccagctactactgataatgatagaatagacgctatttatccgggtggcatacccaaaaggggtgagaatgttccagagtgtttatccagggaaattaaagaagaagttaatatagacaattcttttgtattcatagacactcggttttttattcatggcatcatagaagataccattattaataaattttttgaggtaatcttctttgtcggaagaatatctctaacgagtgatcaaatcattgatacatttaaaagtaatcatgaaatcaaggatctaatatttttagatccgaattcaggtaatggactccaatacgaaattgcaaaatatgctctagatactgcaaaacttaaatgttacggccatagaggatgttattatgaatcattaaaaaaattaactgaggatgattgattaaaaaatataaattaatttaccatcgtgtatttttataacgggattgtccggcatatcatgtagatagttaccgtctacatcgtatactcgaccatctacgcctttaaatcctctatttattgacattaatctattagaattggaataccaaatattagtaccctcaattagtttattggtaatattttttttagacgatagatcgatggctcttgaaaccaaggttttccaaccggactcattgtcgatcggtgagaagtctttttcattagcatgaatccattctaatgatgtatgtttaaacactctaaacaattggacaaattcttttgatttgctttgaatgatttcaaataggtcttcgtctacagtaggcataccattagataatctagccattataaagtgcacgtttacatatctacgttctggaggagtaagaacgtgactattgagacgaatggctcttcctactatctgacgaagagacgcctcgttccatgtcatatctaaaatgaagatatcattaattgagaaaaaactaataccctcgcctccactagaagagaatacgcatgttttaatgcattctccgttagtgtttgattcttggttaaactcagccaccgccttgattctagtatcttttgttctagatgagaactctatattagagataccaaagactttgaaatatagtaataagatttctattcctgactgattaacaaatggttcaaagactagacatttaccatgggatgctaatattcccaaacatacatctataaatttgacgcttttctcttttaattcagtaaatagagagatatcagccgcactagcatcccctttcaatagttctccctttttaaaggtatctaatgcggatttagaaaactctctatctcttaatgaatttttaaaatcattatatagtgttgctatctcttgcgcgtattcgcccggatcacgattttgtctttcaggaaagctatcgaacgtaaacgtagtagccatacgtctcagaattctaaatgatgatatacctgtttttatttcagcgagtttagccttttgataaatttcttcttgctttttcgacatattaacgtatcgcattaatactgttttcttagcgaatgatgcagacccttctacgtcatcaaaaatagaaaactcgttattaactatatacgaacatagtcctcctagtttggagactaattctttttcatcgactagacgtttattctcaaatagcgattggtgttgtaaggatcctggtcgtagtaagttaaccaacatggtgaattcttgcacactattgacgataggtgtagccgataaacaaatcatcttatggttttttaacgcaatggtcttagataaaaaattatatactgaacgagtaggacggatcttaccatcttctttgattaatgatttagaaatgaagttatgacattcatcaataatgacgcatattctactcttggaattaatagttttgatattagtaaaaaatttatttctaaaattttgatcatcgtaattaataaaaatacaatccttcgttatctctggagcgtatctgagtatagtgttcatccaaggatcttctatcaaagcctttttcaccaataagataatagcccaattcgtataaatatccttaagatgtttgagaatatatacagtagtcattgttttaccgacacccgtttcatggaacaataaaagagaatgcatactgtctaatcctaagaaaactcttgctacaaaatgttgataatccttgaggcgtactacgtccgaccccatcatttcaacgggcatattagtagttctgcgtaaggcataatcgatataggccgcgtgtgatttactcatttatgagtgataagtaataactatgttttaaaaatcacagcagtagtttaactagtcttctctgatgtttgttttcgatactttttgaatcagaagtcatactagaataaagcaacgagtgaacgtaatagagagcttcgtatactctattcgaaaactctaagaacttattaatgaattccgtatccactggattgtttaaaatactaaattgaacactgttcacatccttccaagaagaagacttagtgacggacttaacatgagacataaataaatccaaattttttttacaaacatcactagccaccataatggcgctatctttcaaccagctatcgcttacgcattttagcagtctaacatttttaaagagactacaatatattctcatagtatcgattacacctctaccgaataaagttggaagtttaataatacaatatttttcgtttacaaaatcaaataatggtcgaaacacgtcgaaggttaacatcttataatcgctaatgtatagattgttttcagtgagatgattattagatttaatagcatctcgttcacgtttgaacagtttattgcgtgcgctgaggtcggcaactacggcgtccgctttagtactcctcccataatactttacgctattaatctttaaaatttcatagactttatctagatcgctttctggtaacatgatatcatgtgtaaaaagttttaacatgtcggtcggcattctatttagatcattaactctagaaatctgaagaaagtaattagctccgtattccagactaggtaatgggcttttacctagagacagattaagttctggcaatgtttcataaaatggaagaaggacatgcgttccctcccggatattttttacaatttcatccatttacaactctatagtttgttttcattattattagttattatctcccataatcttggtaatacttaccccttgatcgtaagataccttatacaggtcattacatacaactaccaattgtttttgtacataatagattggatggttgacatccatggtggaataaactactcgaacagatagtttatctttccccctagatacattagccgtaatagttgtcggcctaaagaatatctttggtgtaaagttaaaagttagggttcttgttccattattgctttttgtcagtagttcattataaattctcgagatgggtccgttctctgaatatagaacatcatttccaaatctaacttctagtctagaaataatatcggtcttattcttaaaatctattcccttgatgaagggatcgttaatgaacaaatccttggcctttgattcggctgatctattatctccgttatagacgttacgttgactagtccaaagacttacaggaatagatgtatcgatgatgttgatactatgtgatatgtgagcaaagattgttctcttagtggcatcactatatgttccagtaatggcggaaaactttttagaaatgttatatataaaagaattttttcgtgttccaaacattagcagattagtatgaagataaacactcatattatcaggaacattatcaatttttacatacacatcagcatcttgaatagaaacgataccatcttctggaacctctacgatctcggcagactccggataaccagtcggtgggccatcgctaacaataactagatcatccaacaatctactcacatatgcatctatataatctttttcatcttgtgagtaccctggatacgaaataaatttattatccgtatttccataataaggtttagtataaacagagagagatgttgccgcatgaacttcagttacagtcgccgttggttggtttatttgacctattactctcctaggtttctctataaacgatggtttaatttgtacattcttaaccatatatccaataaagctcaattcaggaacataaacaaattctttgttgaacgtttcaaagtcgaacgaagagtcacgaataacgatatcggatactggattgaaggttaccgttacggtaatttttgaatcggatagtttaagactgctgaatgtatcttccacatcaaacggagttttaatataaacgtatactgtagatggttctttaatagtgtcattaggagttaggccaatagaaatatcattaagttcactagaatatccagagtgtttcaaagcaattgtattattgatacaattattatataattcttcgccctcaatttcccaaataacaccgttacacgaagagatagatacgtgattaatacatttatatccaacatatggtacgtaactgaatcttcccatacctttaacttctggaagttccaaactcagaaccaaatgattaagcgcagtaatatactgatccctaatttcgaagctagcgatagcctgattgtctggaccatcgtttgtcataactccggatagagaaatatattgcggcatatacaaagttggaatttgactatcgactgcgaagacattagaccgtttaatagagtcatccccaccgatcaaagaattaatgatagtattattcattttctatttaaaatggaaaaagcttacaataaactccgtagagaaatatctataatttgtgagttttccttaaagtaacagcttccgtaaacgccgtctttatctcttagtaggtttattgtatttatgaccttttccttatcttcatagaatactaaaggcaacaaagaaatttttggttcttctctaagagctacgtgagacttaaccatagaagccaacgaatccctacatattttagaacagaaataccctacttcaccacccttgtatgtctcaatactaataggtctaaaaaccaaatcttgattacaaaaccaacacttatcaattacactatttgtcttaatagacacatctgccatagatttataatactttggtagtatacaagcgagtgcttcttctttagcgggcttaaagactgctttaggtgctgaaataaccacatctggaaggcttactcgcttagccatttaattacggaactatttttttatacttctaatgagcaagtagaaaacctctcatctacaaaaacgtactcgtgtccataatcctctaccatagttacacgttttttagatctcatatgtgctaaaaagttttcccatactaattggttactattatttttcgtataatttttaacagtttgaggttttagatttttagttacagaagtgatatcgaatattttatccaaaaagaatgaataattaattgtcttagaaggagtgttttcttggcaaaagaataccaagtgcttaaatatttctactacttcattaatcttttctgtactcagattcagtttctcatcttttacttgattgattatttcaaagactaacttataatcctttttatttattctctcgttagccttaagaaaactagatacaaaatttgcatctacatcatccgtggatatttgatttttttccatgatatccaagagttccgagataatttctccagaacattgatgagacaataatctccgcaatacatttctcaaatgaataagtttattagacacgtggaagtttgactttttttgtacctttgtacatttttgaaataccgactcgcaaaaaatacaatattcatatccttgttcagatactataccgttatgtctacaaccgctacataatcgtagattcatgttaacactctacgtatctcgtcgtccaatattttatataaaaacattttatttctagacgttgccagaaaatcctgtaatatttttagttttttgggctgtgaataaagtatcgccctaatattgttaccgtcttccgccaatatagtagttaaattatccgcacatgcagaagaacaccgcttaggcggattcagtacaatgttatatttttcgtaccaactcatttaaatatcataatctaaaatagttctgtaatatgtctagcgctaatatattgatcataatcctgtgcataaattaagatacaacaatgtctcgaaatcatcgacatggcttcttccatagttagaagatcgtcgtcaaagttagcaacgtgattcatcaacatttgctgttttgaggcagcaaatactgaaccgtcgccattcaaccattcataaaaaccatcgtctgaatccattgataatttcttgtactggtttttgagagctcgcatcaatctagcatttctagctcccggattgaaaacagaaagaggatcgtacatccagggtccattttctgtaaatagaatcgtataatgtcccttcaagaagatatcagacgatccacaatcaaagaattggtctccgagtttgtaacaaactgcggactttaacctatacatgataccgtttagcataatttctggtgatacgtcaatcggagtatcatctattagagatctaaagccggtgtaacattctccaccaaacatattcttattctgacgtcgttctacataaaacatcattgctccattaacgataacaggggaatgaacagcactacccatcacattagttcccaatggatcaatgtgtgtaactccagaacatcttccatagcctatgttaggaggagcgaacaccactcttccactattgccatcgaatgccatagaataaatatccttggaattgatagaaatcggactgtcggatgttgtgatcatcttcataggattaacaactatgtatggtgccgcctgaagtttcatatcgtaactgatgccgtttataggtctagccacagaaaccaacgtaggtctaaatccaactatagacaaaatagaagccaatatctgttcctcatctgtcataacttgagagcatccagtatgaataatcttcattagatggggatctaccgcatcatcatcgttacaataaaaaattcccattctaatgttcataattgcttttctaatcatggtatgcatgtttgctctctgaatctctgtggaaattagatctgatacacctgtaatcactatcggattatcctccgtaagacgattaaccaacaacatataattataagactttacttttctaaattcataaagttgctggattaggctataggtgtctccatgtacatacgcgttctcgagcgcaggaagtttaataccgaatagtgccatcagaataggatgaatatagtaattagtttctggttttctataaataaaagacaaatcttgtgaactagacatatcggtaaaatgcatggattggaatcgtgtagtcgacagaagaatatgatgattagatggagagtatattttatctaactctttgagttggtcaccgattctaggactagctcgagaatgaataagtactaaaggatgagtacatttcacagaaacactagcattgttcaatgtgctctttacatgggtaaggagttgaaatagctcgtttctatttgttctgacaatatttagtttattcataatgttaagcatatcctgaatagtaaagttagatgtgtcatacttgttagtagttagatatttagcaattgcattcccatcatttctcaatctcgtactccaatcatgcgtggatgctacttcgtcgatggaaaccatacaatcctttttgataggctgttgagattgatcatttcctgcacgtttaggtttggtacgttgatttctagcccctgcggatataaagtcatcgtctacaatttgggacaatgaattgcatacactacaagacaaagatttatcagaagtgtgaatatgatcttcatctaccaaagaaagagtttgattagtataactagattttagtcctgcgttagatgttaaaaaaacatcgctattgaccacggcttccattatttatattcgtagtttttactcgaaagcgtgattttaatatccaatcttattacttttggaatcgttcaaaacctttgactagttgtagaatttgatctattgccctacgcgtatactcccttgcatcatatacgttcgtcaccagatcgtttgtttcggcctgaagttggtgcatatctctttcaacattcgacatgagatccttaagggccatatcgtctagattttgttgagatgctgctcctggatttggattttgttgtgctgttgtacatactgtaccaccagtaggtgtaggagtacatacagtggccacaataggaggttgagaaagtgtaaccgttggagtagtacaagaaatacttccatccgattgttgtgtacatgtagttgttggtaacgtctgagaaggttgggtagatggcggcgtcgtcgttttttgatctttattaaatttagagataatatcctgaacagcattgctcggcgtcaacgctggaaggagtgaactcgccggcgcatcagtatcttcagacagccaatcaaaaagattagacatatcagatgatgtattagtttgttgtcgtggttttggtgtaggagcagtactactaggtagaagaataggagccgatgtagctgttggaaccggctgtggagttatatgaatagttggttgtagcggttggataggctgtctgctggcggccatcatattatctctagctagttgttctcgcaactgtctttgataatacgactcttgagactttagtcctatttcaatcgcttcatcctttttcgtatccggatccttttcttcagaataatagattgacgactttggtgtagaggattctgccagcctctgtgagaacttgttaaagaagtccatttaaggctttaaaattgaattgcgattataagattaaatggcagacacagacgatattatcgactatgaatccgatgatctcaccgaatacgaggatgatgaagaagaggaagaagatggagagtcactagaaactagtgatatagatcccaaatcttcttataagattgtagaatcagcatccactcatatagaagatgcgcattccaatcttaaacatatagggaatcatatatctgctcttaaacgacgctatactagacgtataagtctatttgaaatagcgggtataatagcagaaagctataacttgcttcaacgaggaagattacctctagtttcagaattttctgacgaaacgatgaagcaaaatatgctacatgtaattatacaagagatagaggagggttcttgtcctatagtcatcgaaaagaacggagaattgttgtcggtaaacgattttgacaaagatggtctaaaattccatctagactatattatcaaaatttggaaacttcaaaaacgatattagaatttatacgaatatcgttctctaaatgtcacaatcaagtctcgcatgttcagcaatttattgtcgtactttatatcgtgttcattaacgatatcttgcaaaatagtaatgattctatcttccttcgatagatattcttcagagattattgtcttatattctttcttgttatcagatatgaatttgataagactttgaacattattgatacccgtctgtttaattttttctacagatattttagttttggcagattctatcgtatctgtcaatagacatccaacatcgacattcgacgtcaattgtctataaatcaacgtataaattttagaaataacattagcgaattgttgtgcgttgatgtcgttattctgaaacagtatgattttaggtagcattttcttaacaaagagaacgtatttattgttactcagttgaacagatgatatatccagattactaacgcatctgattccgtataccaaactttcagaagaaatggtatacaattgtttgtattcattcaatgtctctttttcagaaattagtttagagtcgaatactgcaataattttcaagagatagttttcatcagataagattttatttagtgtagatatgataaaactattgttttgttggagaacttgatacgccgcgttctctgtagtcgacgctctcaaatgggaaacaatctccattatttttttggaatcggatactatatcttcggtatcttgacgcagtctagtatacatagagttaagagagattagagtttgtacattaagcaacatgtctctaaatgtggctacaaacttttcctttttcacatcatctagtttattatataccgatttcacaacggcaccagatttaaggaaccagaatgaaaaactctgataactacaatatttcatcatagttacgattttatcatcttctatagttggtgtaatagcgcatacctttttctccaagactggaaccaacgtcataaaaatgtttaaatcaaaatccatatcaacatctgatgcgctaagaccagtctcgcgttcaagattatctttactaatggtgacgaactcatcgtataaaactctaagtttgtccattatttatttacagatttagttgtttaatttatttgtgctcttccagagttgggatagtatttttctaacgtcggtattatattattaggatctacgttcatatgtatcataatattaatcatccacgttttgataaatctatctttagcttctgaaataacgtatttaaacaaaggagaaaaatatttagctacggcatcagacgcaataacattttttgtaaatgtaacgtatttagacgacagatcttcgttaaaaagttttccatctatgtagaatccatcggttgttaacaccattcccgcgtcagattgaataggagtttgaatagtttgttttggaaatagatccttcaataacttatagttgggtgggaaaaaatcgattttatcactagactctttcttttttactatcattacctcatgaactatttcttgaatgagtatatgtattttctttcctatatcggacgcgttcattggaaaatataccatgtcgttaactataagaatatttttatcctcgtttacaaactgaataatatcagatgtagttcgtaaacgaactatatcatcaccagcacaacatctaactatatgatatccactagtttcctttagccgtttattatcttgttccatattagcagtcattccatcatttaagaaggcgtcaaaaataatagggagaaatgacattttggattctgttacaactttaccaaaattaaggatatacggacttactatctttttctcaacgtcaatttgatgaacacacgatgaaaatgtgcttctatgagattgatcatgtagaaaacaacaagggatacaatatttccgcatatcatgaaatatattaagaaatcccaccttattatatttccccaaaggatccatgcacgtaaacattatgccgttatcattaataaagacttctttctcatcggatctgtaaaagttgttactgatttttttcattccaggatctagataattaataatgatgggttttctattcttattctttgtattttggcatatcctagaccagtaaacagtttccactttggtaaaatcagcagacttttgaacgctattaaacatggcattaatggcaataactaaaaatgtaaaatatttttctatgttaggaatatggtttttcactttaatagatatatggtttttggccaaaatgatagatatttttttatccgaggatagtaaaatattattagtcgccgtctctataaaaatgaagctagtctcgatatccaattttattctagaattgataggagtcgccaaatgtaccttatacgttatatctcccttgatgcgttccatttgtgtatctatatcggacacaagatctgtaaatagttttacgttattaatcatcacggtatcgccgtcgctagataacgctaatgtaccatccaagtcccaaatggagagatttaactgttcatcgtttagaataaaatgattaccggtcatattaataaagtgttcatcgtatctagataacaacgacttataattaatgtccaagtcttgaactcgctgaatgatcttttttaacccagttagttttagattggtacgaaatatattgttaaactttgattctacagtaatgtccaaatctagttgtggaaatacttccatcaacattgtttcaaacttgataatattattatctacatcttcgtacgatccaaattccggaatagatgtatcgcacgctctggccacccagataaccaaaaagtcacacgctccaggatatacattgtataaaaagctatcgttttttagtagggtttttttctgcgtgtatacgaagggattaaaaatagtattatcaacgtaactatattccaaattattcttatgagaatagataataatatcgtccttaatatctaacaaatttcctaaatatccctttaattgagtcattcgaagcgtcaatagaatatgtctcttaactatttccggctgttgtatatttaaatgacttcgtaaaaaataatatatgggcgacttctcatctatgtaatcatatggagtgagatatagggctcgttctacctcctgccccttacccacctgtaataccaattgcggacttactatatatcgcatatttatatcgtggggtaaagtgaaaatctactaccgatgatgtaagtcttacaatgttcgaaccagtaccagatcttaatttggaggcctccgtagaactaggggaggtaaatatagatcaaacaacacctatgataaaggagaatagcggttttatatcccgcagtagacgtctattcgcccatagatctaaggatgatgagagaaaactagcactacgattctttttacaaagactttattttttagatcatagagagattcattatttgttcagatgcgttgacgctgtaaaagacgtcactattaccaaaaaaaataacattatcgtggcgccttatatagcacttttaactatcgcatcaaaaggatgcaaacttacagaaacaatgattgaagcattctttccagaactatataatgaacatagtaagaaatttaaattcaactctcaagtatccatcatccaagaaaaactcggataccagtttggaaactatcacgtttatgattttgaaccgtattactctacagtagctctggctattcgagatgaacattcatctggcatttttaatatccgtcaagagagttatctggtaagttcattatctgaaataacatatagattttatctaattaatctaaaatctgatcttgttcaatggagtgctagtacgggcgctgtaattaatcaaatggtaaatactgtattgattacagtgtatgaaaagttacaactggtcatagaaaatgattcacaatttacatgttcattggctgtggaatcaaaacttccaataaaattacttaaagatagaaatgaattatttacaaaattcattaacgagttaaaaaagaccagttcattcaagataagcaaacgcgataaggatacgctactaaaatattttacttaggactggagttagaatttatagacgactcatttcgtttatcattgttactattattactattactatcattattagtgttggcattattagtattcttcttgtcatcttgttcagaaatatacagcaatgctatacctaatactaaatacattatcatgctcgcaatggctctaacaacaacgaaccaaaatgaatttggtcgtagcttttgttcacaaaaatacataaagaaatgtctacataaatctatggcgccattggctacttgaaatagcgccagtcctcctacagattttaatatagctgtataacatgacatttattcatcatcaaaagagacagagtcaccatctgtcatatttagattttttttcatgtgttcaaagtatcctctactcatttcattataatagtttatcatacttagaattttaggacggatcaatgagtaagacttgactagatcgtcagtagtaatttgtgcatcgtctattctgcatccgcttcgtcgaataatgtatagcatcgctttgagattctccatagctatcaagtctttatacaatgacatggaaatatctgtgaatactttatacttctccaacatcgatgccttaacatcatcgcctactttagcattgaaaatacgttctattgtgtagatggatgtagcaagatttttaaacaacaatgccatcttacacgatgattgcctcaagtctccaatcgtttgtttagaacgattagctacagagtccaatgcttggctgactagcatattattatctttagaaattgtattcttcaatgaggcgtttatcatatctgtgatttcgttagtcatattacagtctgactgggttgtaatgttatccaacatatcacctatggatacggtacacgtaccagcatttgtaataatcctatctaagatgttgtatggcattgcgcagaaaatatcttctcctgtaatatctccactctcgataaatctactcagattattcttaaatgccttattctctggagaaaagatatcagtgtccatcatttcattaatagtatacgcagaaaagataccacgagtatcaattctatccaagatacttatcggttccgagtcacagataatggtttcctctccttcgggagatcctgcatagaaatatctaggacaatagtttctatactgtctgtaactctgataatctctaaagtcactaactgataccatgaaattgagaagatcaaacgctgaagtaattaatttttctgcctcgtttttactacaactagttttcatcaatgtagtgacgatgtattgtttagttacttttggtctaatactgatgatagagatattattgcttcccataatggatcttctagtagtcaccttaaagcccattgatgcgaatagcagatagataaagtcttggtatgactcctttctaatatagtacggactacctttgtcacccaactttatacccacataagccataacaacctctttaatagccgtttcatgaggtttatcagccatgagcctgagtagttggaagaatctcatgaatcccgtctcagaaagtcctatatgcatgatagatttatctttcctgggaaactctcgtatagtcatagatgaaatactctttaaagtttctgaaataagattagtaacagtcttacctccgactactctaggtaacaaacaaactctaataggtgttttctctgcggagataatatcagaaaggatagagcaataagtagtattattgtgattataaagaccgaatacataacaggtagaatttataaacatcatgtcctgaaggtttttagacttgtattcctcgtaatccataccgtcccaaaacatggatttggtaactttgatagccgtagatctttgttccttcgccaacaggttaaagaaattaataaagaatttgttgtttctatttatgtccacaaattgcacgtttggaagcgccacggttacattcactgcagcattttgaggatcgcgagtatgaagtacgatgttattgtttactggtatatctggaaagaaatctaccagtctaggaataagagattgatatcgcatagaaatagtaaagtttataatctcatcatcgaagagcattttgttaccattgtaataaatatccactctgtcatatgtataaatgaagtactgttcaaacatgatgagatgtttatatgttggcatagtagtgagatcgacgtttggtaatggcaatgtattaagattaactccataatgtctagcagcatctgcgatgttataagcgtcgtcaaagcggggtcgatcttgtattgttatatattgtctaacacctataagattatcaaaatcttgtctgcttaatacaccgttaacaatttttgccttgaattcttttattggtgcattaataacatccttatagaggatgttaaacaaataagtgttatcaaagttaagatctggatatttcttttctgctagaacatccattgagtcggagccatctggtttaatataaccaccgataaatctagctctgtattctgtatccgtcaatctaatattaagaaggtgttgagtgaaaggtggaagatcgtaaaagctgtgagtattaatgataggattagtttccgaactaatgttaattggggtattaataatatctatatttccagcgttaagtgtaacattaaacagttttaattcacgtgacgtggtatcaattaaataattaatgcccaatttggatatagcagcctgaagctcatcttgtttagttacggatcctaatgagttattaagcaatatatcgaacggatgaacgaaggttgttttaagttggtcacatactttgtaatctagacatagatgcggaagaacggtagaaactatacgaaataaatattcagagtcctctaattgatcaagagtaactattgacttaataggcatcatttatttagtattaaatgacgaccgtaccagtgacggatatacaaaacgatttaattacagagttttcagaagataattatccatctaacaaaaattatgaaataactcttcgtcaaatgtctattctaactcacgttaacaacgtggtagatagagaacataatgccgccgtagtgtcatctccagaggaaatatcctcacaacttaatgaagatctatttccagatgatgattcaccggccactattatcgaacgagtacaacctcatactactattattgacgatactccacctcctacgtttcgtagagagttattaatatcggaacaacgtcaacaacgagaaaaaagatttaatattacagtatcgaaaaatgctgaagcaataatggaatctagatctatgataacttctatgccaacacaaacaccatccttgggagtagtttatgataaagataaaagaattcagatgttagaggatgaagtggttaatcttagaaatcaacgatctaatacaaaatcatctgataatttagataattttaccaaaatactatttggtaagactccgtacaaatcaacagaagttaataagcgtatagccatcgttaattatgcaaatttgaacgggtcccccttatcagtcgaggacttggatgtttgttcggaggatgaaatagatagaatctataaaacgattaaacaatatcacgaaagtagaaaacgaaaaattatcgtcactaacgtgattattattgtcataaacattatcgagcaggcattgctaaaactcggatttgaagaaatcaaaggactgagtaccgatatcacttcagaaattatcgatgtggagatcggagatgactgcgatgctgtagcatctaaactaggaatcggtaacagtccggttcttaatattgtattgtttatactcaagatattcgttaaacgaattaaaattatttaatttaatacattcccatatccagacaacaatcgtctggattaatctgttcctgtcgtctcataccggacgacatattaatctttttattagtgggcatctttttagatggtttctttttcccagcattaactgagtcgatacctagaagatcgtgattgatctctccgaccattccacgaacttctaattggccgtctctgacggtaccataaactattttaccagcattagtaacagcttggacaatctgaccatccatcgcattgtacgatgtagtagtaactgttgttctacgtctaggagcaccagaagtatttttggagcccttggatgttgatgtagaagaagacgaggattttgattttggtttacatgtaatacattttgaactctttgattttgtatcacatgcgccggcagtcacatctgtttgagaattaagattattgttgcctcctttgacggctgcatctccaccgatttgcgctagtagatttttaagctgtggtgtaatcttattaactgtttcgatataatcatcgtaactgcttctaacggctaaattttttttatccgccatttagaagctaaaaatatttttatttatgcagaagatttaactagattatacaatgaactaatatgatccttttccagattatttacaaacttggtattttttggttctggaggaggcgaatttaaattcggacttggattcggattttgtaagttcttgatcttattatacatcgagtataggatggcgacagtaactgctacacaaataccgatcaaaagaagaataccaatcatttattgacaataacttcactattgatcaagtatgcaatatatcatcttttcactaaataagtagtaataatgattcaacaatgtcgagatatatggacgataataatttagttcatggaaatatcgctatgattggtgtgaatgactccgctaactctgtggggtgcgcagtgctttccccacatagaataaattagcattccgactgtgataataataccaagtataaacgccataatactcaatactttccatgtacgagtgggactggtagacttactaaagtcaataaaggcgaagatacacgaaagaatcaaaagaatgattccagcgattagcacgccggaaaaataatttccaatcataagcatcatgtccatttaactaataaaaattttaaatcgccgaatgaacaaagtggaatataaaccatataaaaacaatagtttgtactgcaaaaataatatctatttttgttttcgaagatatggtaaaattaaatagtagtacacagcatgttataactaacagcagcaacggctcgtaattacttatcatttactagacgaaaaggtggtgggatattttcttgctcaaataatacgaatatatcacccatccattttatgcgatgtttatatactctaatctttaatagatctatagacgacgggtttaccaacaatatagattttatcgattcatctaatttaaacccttccttaaacgtgaatgatctattatctggcataacgatgaccctacctgatgaatcggacaatgtactgggccatgtagaataaattatcaacgaattatcgtctacgaacatttatatcatttgttttaattttaggacgcgaataaatggatataaaatagaaaataacagatattacaaccagtgttatggccgcgcccaaccaggtaggcagttttattttatcttttactacaggttctcctggatgtacgtcaccaacggcggacgtagttctagtacaattagacgtaagttccgcttgggaattttttaacgctaaagagttaacgttaatcgtgcacccaacgtatttacatctagttcgttgaacatcttgattataatataaccattttctatctctagattcgtcagtgcactcatgtaaccaacataccctaggtcctaaatatttatctccggaattagattttggataattcgcgcaccaacaatttctatttcctttatgatcgttacaaaagacgtataatgccgtatccccaaaagtaaaataatcaggacgaataattctaataaactcagaacaatatctcgcatccatatgtttggagcaaatatcggaataagtagacatagccggtttccgttttgcacgtaaccattctaaacaattggggtttccaggatcgtttctacaaaatccagtcatgaaatcgtcacaatgttctgtcttgtaattattattaaatatttttggacagtgtttggtatttgtcttagaacaacattttgccacgctatcactatcgcccaggagataatccttttttataaaatgacatcgttgcccggatgctatataatcagtagcgtgttttaaatccttaatatattcaggagttacctcgttctgataatagattaatgatccaggacgaaatttgaaagaactacatggttctccatgaattaatacatattgtttagcaaattcaggaactataaaactactacaatgatctatcgacataccatctatcaaacaaaacttgggtttaatttctcccggagatgtttcataatagtacgtataactttcttctgcaaacttaacagctctattatattcaggataattaaaacctaattccatatatttgtctcgtatatctgctattcctggtgctattttgattctattaagagtaacagctgcccccattcttaataatcgtcagtatttaaactgttaaatgttggtatatcaacatctaccttatttcccgcagtataaggtttgttgcaggtatactgttcaggaatggttacatttatacttcttctatagtcctgtctttcgatgttcatcacatatgcaaagaacagaataaacaaaataatgtaagaaataatattaaatatctgtgaattcgtaaatacattgattgccataataattacagcagctacaatacacacaatagacattcccacagtgttgccattacctccacgatacatttgagttactaagcaataggtaataactaagctagtaagaggcaatagaaaagatgagataaatatcatcaatatagagattagaggagggctatatagagccaagacgaacaaaatcaaaccgagtaacgttctaacatcattatttttgaagattcccaaataatcattcattcctccataatcgttttgcatcatacctccatctttaggcataaacgattgctgctgttcctctgtaaataaatctttatcaagcactccagcacccgcagagaagtcgtcaagcatattgtaatatcttaaataactcatttatatattaaaaaatgtcactattaaagatggagtataatctttatgccgaactaaaaaaaatgacttgtggtcaacccctaagtctttttaacgaagacggggatttcgtagaagttgaaccgggatcatcctttaagtttctgatacctaagggattttacgcctctccttccgtaaagacgagtctagtattcgagacattaacaacgaccgataataaaatcactagtatcaatccaacaaatgcgccaaagttatatcctcttcaacgcaaagtcgtatctgaagtagtttctaatatgaggaaaatgatcgaatcaaaacgtcctctatacatcactcttcacttggcgtgtggatttggtaagactattaccacgtgttatcttatggctacacacggtagaaaaaccgtcatttgcgtacccaataaaatgttaatacatcaatggaagacacaggtagaggcagtcggattggaacataagatatccatagatggagtaagtagtctattaaaggaactaaagactcaaagtccggatgtattaatagtagtcagtagacatctgacaaacgatgccttttgtaaatatatcaataagcattatgatttgttcatcttggatgaatcacatacgtataatctgatgaacaatacagcagttacaagatttttagcgtattatcctccgatgatgtgttattttttaactgctacacctagaccatctaaccgaatttattgtaacagtattattaatattgccaagttatccaatctaaaaaaaactatctatgcagtagatagtttttttgagccatattccacagataatattagacatatggtaaaacgactagatggaccatctaataaatatcatatatataccgagaagttattatctgtagacgagcctagaaatcaacttattcttgataccctggtagaagaattcaagtcaggaactattaatcgcattttagttattactaaactacgtgaacatatggtattattctacaaacgattattagattttttcggaccagaggttgtatttataggagacgcccaaaatagacgtactccagatatggtcaaatcaatcaaggaactaaatagatttatattcgtatccaccttattttattccggtactggtttagatattcctagtttggattcgttgttcatttgctcggcagtaatcaacaatatgcaaatagagcaattactagggagggtatgtcgagaaacagaactattagataggacggtatatgtatttcctaacacatccatcaaagaaataaagtacatgataggaaatttcatgcaacgaattattagtctgtctgtagataaactaggatttaaacaaaaaagttatcggaaacatcaagaatccgatcccacttctgcatgtacaacatcatccagagaagaacgtgtattaaatagaatatttaactcgcaaaatcgttaagaagtttaagcgacgatccgcatgctgcgcaggccagtgtattacccctcatagtattaatataatccaatgatacttttgtgatgtcggaaatcttaaccaatttagactgacaggcagaacacgtcatgcaatcatcatcgtcatcgataactgtagtcttgggcttctttttgcgactcttcattccggaacgcacattggtgctatccatttaggtagtaaaaaataagtcagaatatgccctataacacgatcgtgcaaaacctggtatatcgtctctatctttatcacaatatagtgtatcgacatttttattattattgacctcgtttatcttggaacatggaatgggaacatttttgttatcaacggccatctttgccttaattccagatgttgtaaaattataactaaacagtctatcatcgacacaaatgaaattcttgtttagacgtttgtagtttacgtatgcggctcgttcgcgtctcattttttcagatattgcaggtactataatattaaaaataagaatgaaataacataggattaaaaataaagttatcatgacttctagcgctgatttaactaacttaaaagaattacttagtctgtacaaaagtttgagattttcagattctgcggctatagaaaagtataattctttggtagaatggggaacatctacttactggaaaataggcgtgcaaaaggtagctaatgtcgagacgtcaatatctgattattatgatgaggtaaaaaataaaccgtttaatattgatccgggctattacattttcttaccggtatattttgggagcgtctttatttattcgaagggtaaaaatatggtagaacttggatctggaaactcttttcaaataccagatgatatgcgaagtgcgtgtaacaaagtattagacagcgataacggaatagactttctgagatttgttttgttaaacaatagatggataatggaagatgctatatcaaaatatcagtctccagttaatatatttaaactagctagtgagtacggattaaacatacccaaatatttagaaattgaaatagaggaagacacattatttgacgacgagttatactctattatagaacgctctttcgatgataaatttccaaaaatatccatatcgtatattaagttgggagaacttagacggcaagttgtagactttttcaaattctcattcatgtatattgagtccatcaaggtagatcgtataggagataatatttttattcctagcgttataacaaaatcaggaaaaaagatattagtaaaagatgtagaccatttaatacgatccaaggttagagaacatacatttgtaaaagtaaaaaagaaaaacacattttccattttatacgactatgatggaaacggaacagaaactagaggagaagtaataaaacgaattatagacactataggacgagactattatgttaacggaaagtatttctctaaggttggtagtgcaggcttaaagcaattgactaataaattagatattaatgagtgcgcaactgtcgatgagttagttgatgagattaataaatccggaactgtaaaacgaaaaataaaaaaccaatcagcatttgatttaagcagagaatgtttgggatatccagaagcggattttataacgttagttaataacatgcggttcaaaatagaaaattgtaaggttgtaaatttcaatattgaaaatactaattgtttaaataacccgagtattgaaactatatatggaaactttaaccagttcgtctcaatctttaatgtcgtcaccgatgtcaaaaaaagattattcgagtgaaataatatgcgcctttgatataggtgcaaaaaatcctgccagaactgttttagaagtcaaggataactccgttagggtattggatatatcaaaattagactggagttctgattgggaaaggcgcatagctaaagatttgtcacaatatgaatacactacagttcttctagaacgtcagcctagaaggtcgccgtatgttaaatttatctattttattaaaggctttttatatcatacatcggctgccaaagttatttgcgtctcgcctgtcatgtctggtaattcatatagagatcgaaaaaagagatcggtcgaagcatttcttgattggatggacacattcggattgcgagactccgttccggatagacgcaaattagacgatgtagcggatagtttcaatttggctatgagatacgtattagataaatggaatactaattatacaccttataataggtgtaaatctagaaattacataaaaaaaatgtaataacgttagtaacgccattatggataatctatttacctttctacatgaaatagaagatagatatgccagaactatttttaactttcatctaataagttgcgatgaaataggagatatatatggtcttatgaaagaacgcatttcctcagaggatatgtttgataatatagtgtataataaagatatacatcctgccattaagaaactagtgtattgcgacatccaacttactaaacacattattaatcagaatacgtatccggtatttaacgattcttcacaagtgaaatgttgtcattatttcgacataaactcagataatagcaatattagctctcgtacagtagagatatttgagagggaaaagtcatctcttgtatcatatattaaaactaccaataagaagagaaaggtcaattacggcgaaataaagaaaactgttcatggaggcactaatgcaaattacttttccggtaaaaagtctgacgagtatctgagtactacagttagatccaacattaatcaaccttggatcaaaaccatctctaagaggatgagagttgatatcattaatcactctatagtaacgcgtggaaaaagctctatattacaaactatagaaattatttttactaatagaacatgtgtgaaaatattcaaggattctactatgcacattattctatccaaggacaaggatgaaaaggggtgtatacacatgattgacaaattattctatgtctattataatttatttctgttgttcgaagatatcatccaaaacgagtactttaaagaagtagctaatgttgtaaaccacgtactcacggctacggcattagatgagaaattattcctaattaagaaaatggctgaacacgatgtttatggagttagcaatttcaaaatagggatgtttaacctgacatttattaagtcgttggatcataccgttttcccctctctgttagatgaggatagcaaaataaagttttttaaggggaaaaagctcaatattgtagcattacgatctctggaggattgtataaattacgtgactaaatccgagaatatgatagaaatgatgaaggaaagatcgactattttaaatagcatagatatagaaacggaatcggtagatcgtctaaaagaattgcttctaaaatgaaaaaaaacactaattcagaaatggatcaacgactagggtataagtttttggtgcctgatcctaaagccggagttttttatagaccgttacatttccaatatgtatcgtattctaattttatattgcatcgattgcatgaaatcttgaccgtcaagcggccactcttatcgtttaagaataatacagaacgaattatgatagaaattagcaatgttaaagtgactcctccagattactcacctataatcgcgagtattaaaggtaagagttatgacgcattagccacgttcactgtaaatatctttaaagaggtaatgaccaaagagggtatatccatcactaaaataagtagttatgagggaaaagattctcatttgataaaaattccgctactaataggatacgggaataaaaatccacttgatacagccaagtatcttgttcctaatgtcataggtggagtctttatcaataaacaatctgtcgaaaaagtaggaattaatctagtagaaaagattacaacatggccaaaatttagggttgttaagccaaactcattcactttctcgttttcctccgtatcccctcctaatgtattaccgacaagatatcgccattacaagatatctctggatatatcacaattggaagcgttgaatatatcatcgacaaagacatttataacggtcaatattgttttgctgtctcaatatttatctagagtgagtctagaattcattagacgtagtttatcatacgatatgcctccagaagttgtctatctagtaaacgcgataatagatagtgctaaacgaattactgaatctattactgactttaatattgatacatacattaatgacctggtggaagctgaacacattaaacaaaaatctcagttaacgatcaacgagttcaaatatgaaatgctgcataactttttacctcatatgaactatacacccgatcaactaaagggattttatatgatatctttactaagaaagtttctctactgtatcttccacacttctagatatccagatagagattcgatggtttgtcatcgcatcctaacgtacggcaaatattttgagacgttggcacatgatgaattagagaattacataggcaacatccgaaacgatatcatgaacaatcacaagaacagaggcacttacgcggtaaacattcatgtactaacaactcccggacttaatcacgcgttttctagcttattgagtggaaagttcaaaaagtcagacggtagttatcgaacacatcctcactattcatggatgcagaatatttctattcctaggagtgttggattttatccggatcaagtaaagatttcaaagatgttttctgtcagaaaataccatccaagtcaatatctttacttttgttcatcagacgttccggaaagaggtcctcaggtaggtttagtatctcaattgtctgtcttgagttccattacaaatatactaacgtctgagtatttggatttggaaaagaaaatttgtgagtatatcagatcatattataaagatgatataagttactttgaaacaggatttccaatcactatagaaaatgctctagtcgcatctcttaatccaaatatgatatgtgattttgtaactgactttagacgtagaaaacggatgggattcttcggtaacttggaggtaggtattactttagttagggatcacatgaatgaaattcgcattaatattggagcgggaagattagtcagaccattcttggttgtggataacggagagctcatgatggatgtgtgtccggagttagaaagcagattagacgacatgacattctctgacattcagaaagagtttccgcatgtcatcgaaatggtagatatagaacaatttacttttagtaacgtatgtgaatcggttcaaaaatttagaatgatgtcaaaggatgaaagaaagcaatacgatttatgtgactttcctgccgaatttagagatggatatgtagcatcttcattagtgggaatcaatcacaattctggacccagagctattcttggatgtgctcaagctaaacaagctatctcttgtctgagctcggatatacgaaataaaatagacaatggaattcatttgatgtatccagagaggccaatcgtgattagtaaggctttagaaacttcaaagattgcggctaattgcttcggccaacatgttactatagcattaatgtcgtacaaaggtatcaatcaagaggatggaattatcatcaaaaaacaatttattcagagaggcggtctcgatattgttacagccaagaaacatcaagtagaaattccattggaaaactttaataacaaagaaagagataggtctaacgcctattcaaaattagaaagtaatggattagttagactgaatgctttcttggaatccggagacgctatggcacgaaatatctcatcaagaactcttgaagatgattttgctagagataatcagattagcttcgatgtttccgagaaatataccgatatgtacaaatctcgcgttgaacgagtacaagtagaacttactgacaaagttaaggtacgagtattaaccatgaaagaaagaagacccattctaggagacaaatttaccactagaacgagtcaaaagggaacagtcgcgtatgtcgcggatgaaacggaacttccatacgacgaaaatggtatcacaccagatgtcattattaattctacatccatcttctctagaaaaactatatctatgttgatagaagttattttaacagccgcatattctgctaagccgtacaacaataagggagaaaaccgacctgtctgttttcctagtagtaacgaaacatccatcgatacatatatgcaattcgctaaacaatgttatgagcattcaaatccgaaattgtccgatgaagaattatcggataaaatcttttgtgaaaagattctctatgatcctgaaacggataagccttatgcatccaaagtattttttggaccaatttattacttgcgtctgaggcatttaactcaggacaaggcaaccgttagatgtagaggtaaaaagacgaagctcattagacaggcgaatgagggacgaaaacgtggaggaggtatcaagttcggagaaatggagagagactgtttaatagcgcatggtgcagccaatactattacagaagttttgaaagattcggaagaagattatcaagatgtgtatgtttgtgaaaattgtggagacatagcagcacaaatcaagggtattaatacatgtcttagatgttcaaaacttaatctctctcctctcttaacaaaaattgataccacgcacgtatctaaagtatttcttactcaaatgaacgccagaggcgtaaaagtcaaattagatttcgaacgaaggcctccttcgttttataaaccattagataaagttgatctcaagccgtcttttctggtgtaatattctagtttggtagtagatacatatcaatatcatcaaattcgagatccgaattataaaatgggcgtggattgttaactatagaatcggacgtctgatattcgaaaatctgtggagtttcaggttttggtggaggtgtaactgctacttgggatactgaagtctgatattcagaaagctgtggatgttctggttcggcatccaccgatggtgtcacatcactaatcggttcggtaacgtctgtggatggaggtgctacttctacagaacctgtagcctcagttgtcaacggagatacatttttaatgcgagaaaatgtataatttggtaatggtttcttatgtggatctgaagaagaggtaagatatctactagaaagataccgatcacgttctagttctcttttgtagaacttaactttttctttctccgcatctagttgatattccaacctcttcacgttactacgttcagattccaattcacgttcgcatgggttacctccgcagtttttacgagcgatttcacgttcagccttcatgcgtctctccctctctctatcgagtttatcagagcagtctttctgaaggcgatcgaactccataaatttctccaacgctttgattgtttccatagatttccgaagttcagcttttaggactgtgattctttttctttcgaattcacagctggatgtacaaccgtttccattaccgccatctctaagtttcttttctagatcggcaacatttcatccccatgccttttacattcctcgagtctactgtcgtcgaaatatcgttccagctccttttcgacatcaataactttagcacgttgtctctcaagctctcttttgtagttatctgattccctggcacgtttaagatcttcatgcaattgagtcagctcttaacttcctctcttgcttcttcgtcatagtacgcgcaatcactgtgagatccattgttaccacgtctacactcggcgagctcgcgtttaagagattcaatttcccgtttgtattggtccatgtttccattgctaccaccattagatttacaggctgctagttgtcgttcgagatcagaaatacgggttttcttggaattgatttcgtcgatgtacttggcatcgaaacacttattaagttctttttccaattctacgattttatttctttcgcgagtcaattccctcctgtagtaactatctgttttgtcagattcacgctctctacgtagactttcttgcaagttactaatttgttccctagcacgtccgagtttagttttatatgctgaatagagttctgattcatcctttgagcagatctctagcgatcgtttaagattcctaattctagtctttagcctatttacctcctcagaagatgttccgttaccgttgcgtttacactcgttaagctgtctatcaagatccatgattctatctctaagacgttgcatctctctttccatatcagcattgctttcattattacgtctgcagtcactcaactgtctttcaatatctgagattctatctctaagacgtcgcatctctctctgtttcggcattggtttcattattacgtttacagtcgttcaactgtctttcaagatctgatattctagattggagtctgctaatctctgtagcattttcacggcattcactcagttgtctttcaagatctgaaattttagattggagtctgctaatctctgtaagatttcctcctccgctctcgatgcagtcggtcaacttattctctagttctctaatacgcgaacgcagtgcatcaacttcttgcgtgtcttcctggttgcgtgtacattcatcgagatctctaacgcgtcgtcgttcttcctcaagttctctgcgtactacagaaagcgtgtccctatcttgttgatatttagcaatttctgattctagagtactgattttgcttacgtagttactaatagttgtcttggccttatcaagatcctccttgtatttgtcgcattccttgatatccctacgaagtctggacagttcccattcgacattacgacgtttatcgatttcagctcggagatcgtcatcgcgttgttttagccacatacgactgagttcaagttctcgttgacaagatccatctacttttccattcctaatagtatccagttccttttctagttctgaacgcatttctcgttccctatcaagcgattctctcaattctcggatagtcttcttatcaatttctaataaatctgaaccatcatctgtcccattttgaatatccctgtgttctttgatctcttttgtaagtcggtcgattctttcggttttataaacagaatccctttccaaagtcctaatcttactgagtttatcactaagttctgcattcaattcggtgagttttctcttggcttcttccaactctgttttaaactctccactatttccgcattcttcctcgcatttatctaaccattcaattagtttattaataactagttggtaatcagcgattcctatagccgttcttgtaattgtgggaacataattaggatcttctaatggattgtatggcttgatagcatcatctttatcattattagggggatggacaaccttaattggttggtcctcatctcctccagtagcgtgtggttcttcaataccagtgttagtaataggcttaggcaaatgcttgtcgtacgcgggcacttcctcatccatcaagtatttataatcgggttctacttcagaatattcttttctaagagacgcgacttcgggagttagtagaagaactctgtttctgtatctatcaacgctggaatcaatactcaagttaaggatagcgaatacctcatcgtcatcatccgtatcttctgaaacaccatcatatgacatttcatgaagtctaacgtattgataaatagaatcagatttagtattaaacagatccttaacctttttagtaaacgcatatgtatattttagatctccagatttcataatatgatcacatgccttaaatgtcagtgcttccatgatataatctggaacactaatgggtgacgaaaaagatacagcaccatatgctacgttgataaataaatctgaaccactaagtagataatgattaatgttaagaaagaggaaatattcagtgtataggtatgtcttggcgtcatatcttgtactaaacacgctaaacagtttgttaatgtgatcaatttccaatagattaattagagcagcgggaataccaacaaacatattaccacatccgtattttctatgaatatcacatatcatgttaaaaaatcttgatagaagagcgaatatctcgtctgacttaatgagtcgtagttcagcagcaacataagtcataactgtaaatagaacatactttcctgtagtgttgattctagactccacatcaacaccattattaaaaatagttttatatacatctttaatctgctctccgttaatcgtcgaacgttctagtatacggaaacactttgatttcttatctgtagttaatgacttagtgatatcacgaagaatattacgaattacatttcttgtttttcttgagagacctgattcagaactcaactcatcgttccatagtttttctacctcagtggcgaaatctttggagtgcttggtacatttttcaataaggttcgtgacctccatttattataaaaaatttattcaaaacttaactacaatcgggtaattataagatcgtagatctcccatgtggcggaatactaccatctatcgcatgtggatggacagtaggtaatggccatgggaacagtaatgtttgcatatttatctttcttgctagtattactgcatattgtcccaatgtttcgatgtgatgttctaacctatcaactgccgctgtatcacaacaatagtgtccgatgaaattaagattatgatccaatgtgtttaatatatgattatcaagtcttatacgatccgcgtcttttttgacaggatcaggttcttctacaggaagaagtttcggcctcttatgatattcatgtctgggaaacggtggtctagggtgaggctccggtatcggagtgggttttggattataatcatcatcgtctatgacatcatcttcgacttcgatatttattttgctatcttgatgatgtcctgtatcagttgcattttcagcactcgactgaatattagcgcattcattgtctattattaccatatttctaaacccaaaatgtatgtgttgaacatcagtactatcgttgatgagtcttatagcatgaattcgcttatcgttatcgggtttatcttctgtcaccttagcaattccttttttattaaactctacataatcatatccatttctattgtttgttctaatataaacgagtatagcatcattgctaaatttttcaatagtatcaaaaacagaatatcctaaaccatataatatatattcaggaacactcaaactaaatgtccaggattctcctaaatacgtaaactttaatagtgcgaaatcattcaaaaatctaccacttatagatagatagtacataaatgcgtatagtagtctacctatctctttattatgaaaaccggcattacgatcatatatgtcgtgatatacctgtgatccgtttacgttaaaccataaatacatgggtgatcctataaacatgaatttatttctaattctcagagctatagttaattgaccgtgtaatatttgcttacatgcatacttgatacgcttattaataagatttttatcattgctcgttatttcagaatcgtatatataaggagtaccatcgtgattcttaccagatattatacaaaatactatatataaaatatattgacccacgttagtaatcatataaatgtttaacgttttaaattttgtattcaatgatccattatcatacgctatcatggtcttgtaatattcattctttaaaatataatattgtgttagccattgcattggagctcctaatggagattttctattctcatccattttaggataggctttcataaagtccctaataacttcgtgaataatgtttctatgttttctactgatgcatgtatttgcttcgatttttttatcccatgtttcatctatcatagatttaaacgcagtaatgctcgcaacattaacatcttgaaccgttggtacaattccgttccataaatttataatgttcgccatttatataactcattttttgaatatacttttaattaacaaaagagttaagttactcatatggacgccgtccagtctgaacatcaatctttttagccagagatatcatagccgctcttagagtttcagcgtgattttccaacctaaatagaacttcatcgttgcgtttacaacacttttctatttgttcaaactttgttgttacattagtaatctttttttccaaattagttagccgttgtttgagagtttcctcattgtcgtcttcatcggctttaacaattgcttcgcgtttagcctctggctttttagcagcctttgtagaaaaaaattcagttgctggaattgcaagatcgtcatctccggggaaaagagttccgtccatttaaagtacagattttagaaactgacactctgcgttatttatatttggtacaacacatggattataaatattgatgttaataacatcagaaaatgtaaagtctatacattgttgcatcgtgttaaattttctaatggatctagtattattgggtccaacttctgcctgaaatccaaatatggaagcggatacaaaaccgtttcctggataaaccacacatctccacttttgctttacatcagaaattgtgtcgttgacatcttgaactctcctatctaatgccggtgttccacctatagattttgaatattcgaatgctgcatgagtagcattaaattccttaatattgccataattttcatatattgagtaaccctggataaaaagtaaacacaccgcagccgtcgctaccacaataaaaaaaattgatagagagttcatttataatctattagaagctgacaaaatttttttacacgcatcagacaatgctttaataaatagttcaacatctacttttgtcatatcgaaccgatggtatgattctaacctagaattacatccgaaaaagttgactatgttcatagtcattaagtcattaacaaacaacattccagactctggattataagacgatactgtttcgtcacaattacctaccttaatcatgtgattatgaatattggctattagagcaccttctaagaaatctataatatctttgaaacacgatttaaaatcaaaccacgaatatacttctacgaagaaagttagtttacccataggagaaataactataaatggagatctaaatacaaaatccggatctatgatagttttaacattattatattctctattaaatacctccacatctaaaaatgttaattttgaaactatgtcttcgtttattaccgtacctgaactaaacgctataagctctattgtttgagaactctttaaacgatattcttgaaatacatgtaacaaagtttcctttaactcggtcggtttatctaccatagttacagaatttgtatccttatctataatataataatcaaaatcgtataaagttatataattatcgcgttcagattgtgatcttttcaaatagactaaaaaccccatttctctagtaagtatcttatgtatatgtttgtaaaatatcttcatggtgggaatatgctctaccgcagttagccattcctcattgacagcggtagatgtattagacaaaactattccaatgtttaacaagggccattttacgagattattaaatccttgtttgataaatgtagccaatgagggttcgagttcaacgacgattgaattctcttcccgcggatgctgcatgatgaacgacgggatgttgttcgattgatttggaattctttttcgactttttgtttatattaaatattttaaaatttatagcggatagcaattcatgtaccacggataatgtagacgcgtattgcgcatcgatatctttattattagataaatttatcaataaatgtgagaagtttgcctcgttaaggtcttccatttaaatattatataaacatttgtgtttgtatcttattcgtcttttatggaatagttttttactagtaaagctgcaattacacactttgtccgtaaaacataaatataaacaccagcttttatcaatcgttccaaaaagtcgacggcggacatttttaacatggcatctattttaaatacacttaggtttttggaaaaaacatcattttataattgtaacgattcaataactaaagaaaagattaagattaaacataagggaatgtcatttgtattttataagccaaagcattctaccgttgttaaatacttgtctggaggaggtatatatcatgatgatttggttgtattggggaaggtaacaattaataatctaaagatgatgctattttacatggatttatcatatcatggagtgacaagtagtggagcaatttacaaattgggatcgtctatcgatagactttctctaaataggactattgttacaaaagttaataattatgatgatacattttttgacgacgatgattgatcgctattgcacaattttgtttttgtactttctaatatagtgtttaggttctttttcatatgagaatattgatttactaaaatatctatgtttaacttttgttctatgacgtccttatcggcggtatcggtacatatacgtaattcaccttcacaaaatacggagtcttcgataataatagccaatcgattattggatctagctgtctgtatcatattcaacatgtttaatatatcctttcgtttcccctttacaggcatcgatcgtagcatattttccgcgtctgatatggaaatgttaaaactacaaaaatgcgtaatgttagcccgtcctaatattggtacgtgtctataagtttggcatagtagaataatagacgtgtttaaatgccttccaaagtttaagaattctattagagtattgcattttgatagtttatcgcctacatcatcaaaaataagtaaaaagtgtgctgattttttatgattttgtgcgacagcaatacatttttctatgttacttttagttcgtatcagattatattctagagattcctgactactaacgaaattaatatgatttggccaaatgtatccatcataatctgggttataaacgggtgtaaacaagaatatatgtttatattttttaactagtgtagaaaacagagatagtaaatagatagtttttccagatccagatcctcctgttaaaaccattctaaacggcatttttaataaattttctcttgaaaattgtttttcttggaaacaattcataattatatttacagttactaaattaatttgataataaatcaaaatatggaaaactaaggttgttagtagggaggagaacaaagaaggcacatcgtgatataaataacatttattatcatgatgacaccagaaaacgacgaagagcagacatctgtgttctccgctactgtttacggagacaaaattcagggaaagaataaacgcaaacgcgtgattggtctatgtattagaatatctatggttatttcactactatctatgattaccatgtccgcgtttctcatagtgcgcctaaatcaatgcatgtctgctaacgaggctgctattactgacgccgctgttgccgttgctgctgcatcatctactcatagaaaggttgcgtctagcactacacaatatgatcacaaagaaagctgtaatggtttatattaccagggttcttgttatatattacattcagactaccagttattctcggatgctaaagcaaattgcactgcggaatcatcaacactacccaataaatccgatgtcttgactacctggctcattgattatgttgaggatacatggggatctgatggtaatccaattacaaaaactacatccgattatcaagattctgatgtatcacaagaagttagaaagtatttttgtgttaaaacaatgaactaatatttatttttgtacattaataaatgaaatcgcttaatagacaaactgtaagtaggtttaagaagttgtcggtgccggccgctataatgatgatactctcaaccattattagtggcataggaacatttctgcattacaaagaagaactgatgcctagtgcttgcgccaatggatggatacaatacgataaacattgttatttagatactaacattaaaatgtctacagataatgcggtttatcagtgtcgtaaattacgagctagattgcctagacctgatactagacatctgagagtattgtttagtattttttataaagattattgggtaagtttaaaaaagaccaatgataaatggttagatattaataatgataaagatatagatattagtaaattaacaaattttaaacaactaaacagtacgacggatgctgaagcgtgttatatatacaagtctggaaaactggttaaaacagtatgtaaaagtactcaatctgtactatgtgttaaaaaattctacaagtgacaacaaaaaatgaattaataataagtcgttaacgtacgccgccatggacgccgcgtttgttattactccaatgggtgtgttgactataacagatacattgtatgatgatctcgatatctcaatcatggactttataggaccatacattataggtaacataaaaactgtccaaatagatgtacgggatataaaatattccgacatgcaaaaatgctactttagctataagggtaaaatagttcctcaggattctaatgatttggctagattcaacatttatagcatttgtgccgcatacagatcaaaaaataccatcatcatagcatgcgactatgatatcatgttagatatagaagataaacatcagccattttatctattcccatctattgatgtttttaacgctacaatcatagaagcgtataacctgtatacagctggagattatcatctaatcatcaatccttcagataatctgaaaatgaaattgtcgtttaattcttcattctgcatatcagacggcaatggatggatcataattgatgggaaatgcaatagtaattttttatcataaaagttgtaaagtaaataataaaacaataaatattgaactagtagtacgtatattgagcaatcagaaatgatgctggtacctcttatcacggtgaccgtagttgcgggaacaatattagtatgttatatattatatatttgtaggaaaaagatacgtactgtctataatgacaataaaattatcatgacaaaattaaaaaagataaagagttctaattccagcaaatctagtaaatcaactgatagcgaatcagactgggaggatcactgtagtgctatggaacaaaacaatgacgtagataatatttctaggaatgagatattggacgatgatagcttcgctggtagtttaatatgggataacgaatccaatgttatggcgcctagcacagaacacatttacgatagtgttgctggaagcacgctgctaataaataatgatcgtaatgaacagactatttatcagaacactacagtagtaattaatgaaacggagactgttgaagtacttaatgaagataccaaacagaatcctaactattcatccaatcctttcgtaaattataataaaaccagtatttgtagcaagtcaaatccgtttattacagaacttaacaataaatttagtgagaataatccgtttagacgagcacatagcgatgattatcttaataagcaagaacaagatcatgaacacgatgatatagaatcatcggtcgtatcattggtgtgattagtttcctttttataaaattgaagtaatatttagtattattgctgccgtcacgttgtacaaatggagatattccctgtattcggcatttctaaaattagcaattttattgctaataatgactgtagatattatatagatacagaacatcaaaaaattatatctgatgagatcaatagacagatggatgaaacggtacttcttaccaacatcttaagcgtagaagttgtaaatgacaatgagatgtaccatcttattcctcatagattatcgacgattatactctgtattagttctgtcggaggatgtgttatctctatagataatgacatcaatggcaaaaatattctaacctttcccattgatcatgctgtaatcatatccccactgagtaaatgtgtcgtagttagcaagggtcctacaaccatattggttgttaaagcggatatacctagcaaacgattggtaacatcgtttacaaacgacatactatatgtaaacaatctgtcactgattaattatttgccgttgtctgtattcattattagacgagtcaccgactatttggatagacacatatgcgatcagatatttgctaataataagtggtattcccttataaccatcgacgataagcaatatcctattccatcaaactgtataggtatgtcctctgccaagtacataaattctagcatcgagcaagatactttaatccatgtttgtaacctcgagcatccgttcgactcagtatacaaaaaaatgcagtcgtacaattctctacctatcaaggaacaaatattgtacggtagaattgataatataaatatgagcattagtatttctgtggattaatagatttctagtatggggatcattaatcatctctaatctctaaatacctcataaaacgaaaaaaaagctattatcaaatactgtacggaatggattcattctcttctctttttatgaaactctgttgtatatctactgataaaactggaagcaaaaaatctgatagaaagaataagaataagatcaaggattatatggaacacgattattataaaataacaatagttcctggttcctcttccacgtctactagctcgtggtattatacacatgcctagtaatagtctctttgcgttgacggaaagcagactagaaataacaggctaaaatgttcagacaccataatagttcccaacccagataataacagagttccatcaacacattcctttaaactcaatcccaaacccaaaaccgttaaaatgtatccggccaattgatagtagataatgaggtgtacagcgcatgataatttacacagtaaccaaaatgaaaatactttagtaattataagaaatatagacggtaatgtcatcatcaacaatccgataatatgcctgagagtaaacattgacggataaaacaaaaatgctccgcataactctatcatggcaataacacaaccaaatacttgtaagattcctaaattagtagaaaatacaacgaatatcgatgtataagtgatctcgagaaataataagaataaagtaatgcccgtaaagataaacatcaacattgtttggtaatcattaaaccaattagtatgaagttgaactaatttcacagtagattttattccagtgttatcctcgcatgtataagtacctggtaagatatctttatattccataatcaatgagacatcactatctgataacgaatgaagtctagcactagtatgccatttacttaatattgtcgtcttggaagttttattataagttaaaatatcatggttatccaatttccatctaatatactttgtcggattatctatagtacacggaataatgatggtatcattacatgctgtatactctatggtctttgtagttgttataacaaccaacgtatagaggtatatcaacgatattctaactcttgacattttttatttatttaaaatgatacctttgttatttattttattctattttgctaacggtattgaatggcataagtttgaaacgagtgaagaaataatttctacttacttattagacgacgtattatacacgggtgttaatggggcggtatacacattttcaaataataaactaaacaaaactggtttaactaataataattatataacaacatctataaaagtagaggatgcggataaggatacattagtatgcggaaccaataacggaaatcccaaatgttggaaaatagacggttcagacgacccaaaacatagaggtagaggatacgctccttatcaaaatagcaaagtaacgataatcagtcacaacggatgtgtactatctgacataaacatatcaaaagaaggaattaaacgatggagaagatttgacggaccatgtggttatgatttattcacggcggataacgtaattccaaaagatggtttacgaggagcattcgtcgataaagacggtacttatgacaaagtttacattcttttcactgatactatcggctcaaagagaattgtcaaaattccgtatatagcacaaatgtgcctaaacgacgaaggtggtccatcatcattgtctagtcatagatggtcgacgtttctcaaagtcgaattagaatgtgatatcgacggaagaagttatagacaaattattcattctagaactataaaaacagataatgatacgatactatatgtattcttcgatagtccttattccaagtccgcattatgtacctattctatgaataccattaaacaatctttttctacgtcaaaattggaaggatatacaaagcaattgccgtctccagctcctggtatatgtttaccagctggaaaagttgttccacataccacgtttgaagtcatagaacaatataatgtactagatgatattataaagcctttatctaaccaacctatcttcgaaggaccgtctggtgttaaatggttcgatataaaggagaaggaaaatgaacatcgggaatatagaatatacttcataaaagaaaattctatatattcgttcgatacaaaatctaaacaaactcgtagctcgcaagtcgatgcgcgactattttcagtaatggtaactgcgaaaccgttatttatagcagatatagggataggagtaggaatgccacaaatgaaaaaaatacttaaaatgtaatcttaatcgagtacaccacacgacaatgaacaaacataagacagattatgctggttatgcttgctgcgtaatatgcggtctaattgtcggaattatttttacagcgacactattaaaagttgtagaacgtaaattagttcatacaccattaatagataaaacgataaaagatgcatatattagagaagattgtcctactgactggataagctataataataaatgtatccatttatctactgatcgaaaaacctgggaggaaggacgtaatgcatgcaaagctctaaattcaaattcggatctaattaagatagagactccaaacgagttaagttttttaagaagccttagacgaggctattgggtaggagaatccgaaatattaaaccagacaaccccatataattttatagctaagaatgccacgaagaatggaactaaaaaacggaaatatatttgtagcacaacgaatactcccaaactgcattcgtgttacactatataacaattacactacatttttatcataccactacttcggttagatgttttagaaaaaaataaatatcgccgtaccgttcttgtttttataaaaataacaattaacaattatcaaattttttctttaatattttacgtggttgaccattcttggtggtaaaataatctcttagtgttggaatggaatgctgtttaatgtttccacactcatcgtatattttgacgtatgtagtcacatcgtttacgcaatagtcagactgtagttctatcatgcttcctacatcagaaggaggaacagttttaaagtctcttggttttaatctattaccgttagttttcatgaaatcctttgttttatccacttcacattttaaataaatgtccactatacattcttttgttaattttactagatcgtcatgggtcatagaatttataggttccgtagtccatggatccaaactagcaaacttcgcgtatacggtatcgcgattagtgtatacaccaactgtatgaaaattaagaaaacagtttaataaatcaacagaaatatttaatcctccgtttgatacagatgcgccatatttatggatttcggattcacacgttgtttgtctgaggtgttcgtctagtgttgcttctacgtaaacttcgattcccatatattctttattgtcagaatcgcataccgatttatcatcatacactgtttgaaaactaaatggtatacacatcaaaataataaataataacgagtacattctgcaatattgttatcgtaattggaaaaatagtgttcgagtgagttggattatgtgagtattggattgtatattttattttatattttgtaataagaataaaatgctaatgtcaagtttattccaatagatgtcttattaaaaacatatataataaataacaatggctgaatggcataaaattatcgaggatatctcaaaaaataataagttcgaggatgccgccatcgttgattacaagactacaaagaatgttctagctgctattcctaacagaacatttgccaagattaatccgggtgaaattattcctctcatcactaatcgtaatattctaaaacctcttattggtcagaaatattgtattgtatatactaactctctaatggatgagaacacgtatgctatggagttgcttactgggtacgcccctgtatctccgatcgttatagcgagaactcataccgcacttatatttttgatgggtaagccaacaacatccagacgtgacgtgtatagaacgtgtagagatcacgctacccgtgtacgtgcaactggtaattaaaataaaaagtaatattcatatgtagtgtcaattttaaatgatgatgatgaaatggataatatccatattgacgatgtcaataatgccggtattggcatacagttcatcgatttttagatttcattcagaggatgtggaattatgttatgggcatttgtattttgataggatctataatgtagtaaatataaaatataatccgcatattccatatagatataattttattaatcgcacgttaaccgtagatgaactagacgataatgtcttttttacacatggttattttttaaaacacaaatatggttcacttaatcctagtttgattgtctcattatcaggaaacttaaaatataatgatatacaatgctcagtaaatgtatcgtgtctcattaaaaatttggcaacgagtacatctactatattaacatctaaacataagacttattctctacatcggtccacgtgtattactataataggatacgattctattatatggtataaagatataaatgacaagtataatgacatctatgattttactgcaatatgtatgctaatagcgtctacattgatagtgaccatatacgtgtttaaaaaaataaaaatgaactcttaattatgctatgctattagaaatggataaaatcaaaattacggttgattcaaaaattggtaatgttgttaccatatcgtataacttggaaaagataactattgatgtcacacctaaaaagaaaaaagaaaaggatgtattattagcgcaatcagttgctgtcgaagaggcaaaagatgtcaaggtagaagaaaaaaatattatcgatattgaagatgacgatgatatggatgtagaaagcgcgtaatacgatctataaaaataagtatataaatactttttatttactgtactcttactgtgtagtggtgataccctactcgattatttttttaaaaaaaaaatacttattctgattcttctagccatttccgtgttcgtttgaatgccacatcgacgtcaaagataggggagtagttgaaatctagttctgcattgttggtacgcacctcaaatgtagtgttggatatcttcaacgtatagttgttgagtagtgatggttttctaaatagaattctcttcatatcattcttgcacgcgtacatttttagcatccatcttggaatcctagatccttgttctattcccaatggtttcatcaatagaagattaaacatatcgtacgaacacgatggagagtaatcgtagcaaaagtaagcatttcctttaatcttagatcccggatactggatatattttgcagccaacacgtgcatccatgcagcatttcctacatatacccggctatgcaccgcgtcatcatcgactgtacgatacataatgttaccgtgttgcttacattgctcgtaaaagactttcatcaatttgtctccttctccgtaaattccagtgggtcttaggcaacaagtatacaattttgctccattcatgattacggaattattggctttcataaccagttgctcggccatacgtttactttttgcgtatacatgtcctggtgatatatcataaagggtatgctcatggccgatgaatggatcaccgtgtttattgggtcctattgcttccatgctactagtatagatcaaatacttgattcctaggtccacacaagctgccaaaatagtctgtgttccataatagtttactttcatgatttcattatcggtgtattttccaaatacatccactagagcagccgtatgaataatcagatttaccccatctagcgcttctctcaccttatcaaagtcgtttatatcacattgtatatagtttataaccttaactttcgaggttattggttgtggatcttctacaatatctatgactctgatttcttgaacatcatctgcactaattaacagttttactatatacctgcctagaaatccggcaccaccagtaaccgcgtacacggccattgctgccactcataatatcagactacttattctattttactaaataatggctgtttgtataatagaccacgataatatcagaggagttatttactttgaaccagtccatggaaaagataaagttttaggatcagttattggattaaaatccggaacgtatagtttgataattcatcgttacggagatattagtcaaggatgtgattccataggcagtccagaaatatttatcggtaacatctttgtaaacagatatggtgtagcatatgtttatttagatacagatgtaaatatatttacaattattggaaaggcgttatctatttcaaaaaatgatcagagattagcgtgtggagttattggtatttcttacataaatgaaaagataatacattttcttacaattaacgagaatggcgtttgatatatcagttaatgcgtctaaaacaataaatgcattagtttacttttctactcagcaaaataaattagtcatacgtaatgaagttaatgatacacactacactgtcgaatttgatagggacaaagtagttgacacgtttatttcatataatagacataatgacaccatagagataagaggggtgcttccagaggaaactaatattggttgcgcggttagtatgacttacttgtataataagtatagttttaaactgattttagcagaatatataagacacagaaatactatatccggcaatatttattcggcattgatgacactagatgatttggctattaaacagtatggagacattgatctattatttaatgagaaacttaaagtagactccgattcgggactatttgactttgtcaactttgtaaaggatatgatatgttgtgattctagaatagtagtagctctatctagtctagtatctaaacattgggaattgacaaataaaaaatataggtgtatggcattagccgaacatatatctgatagtattccaatatctgagctatctagactacgatacaatctatgtaagtatctacgcggacacactgagagcatagaggataaatttgattattttgaagacgatgattcgtctacatgttctgccgtaaccgacagggaaacggatgtataattttttttatagcgtgaaggatatgataaaaaatataattgttgtatttatcccattccaatcaccttatatgattctgtaacacaataaaggagtcttatagatgtatagaggtcagatactggtttgataaactgtttattccacataagtatgtttgactttatggttagacccgcatactttaacaaatcactgaaaattggagttaggtattgacctctcagaatcagttgccgttctggaacattaaatgtattttttatgatatactccaacgcatttatgtgggcatacaacaagtcattactaatggaatattccaagagttttagttgtctagtatttaacaagagaagagatttcaacagactgtttatgaactcgaatgccgcctcattgtcgcttatattgatgatgtcgaattctcccaatatcatcaccgatgagtagctcatcttgttatcgggatccaagttttctaaagatgtcattaaaccctcgatcatgaatggatttatcatcatcgtttttatgttggacatgagcttagtccgtttgtccacatctatagaagatgatttctgaattatttcatatatctctctctttaactccaggaacttgtcaggatggtctactttaatatgttctcgtctaagagatgaaaatctttggatggttgcacgcgacttttctctaaaggatgacgttgcccaagatcctctcttaaatgaatccatcttatccttggacaagatggacagtctattttccttagatggtttaatatttttgttacccatgatctataaaggtagacctaatcgtctcggatgaccatatatttattttcagttttattatacgcataaattgtaaaaaatatgttaggtttacgaaaatgtctcgtggggcattaatcgtttttgaaggattggacaaatctggaaaaacaacacaatgtatgaacatcatggaatcaataccttcaaacacaataaaataccttaactttcctcagagatccactgtcactggaaagatgatagatgactatctaactcgtaaaaaaacctataatgatcatatagttaatctattattttgtgcaaatagatgggagtttgcatcttttatacaagaacaactagaacagggaattactttaatagttgatagatacgcattttctggagtagcgtatgccgccgctaaaggcgcgtcaatgactctcagtaagagttatgaatctggattgcctaaacccgacttagttatattcttggaatctggtagcaaagaaattaatagaaacgtcggtgaggaaatttatgaagatgttacattccaacaaaaggtattacaagaatataaaaaaatgattgaagaaggagatattcattggcaaattatttcttctgaattcgaggaagatgtaaagaaggagttgattaagaatatagttatagaggctatacacacggttactggaccagtggggcaactgtggatgtaatagtgaaattacattttttataaatagatgttagtacagtgttataaatggatgaagcatattactctggcaacttggaatcagtactcggatacgtgtccgatatgcataccgaactcgcatcaatatctcaattagttattgccaagatagaaactatagataatgatatattaaacaaggacattgtaaattttatcatgtgtagatcaaacttggataatccatttatctctttcctagatactgtatatactattatagatcaagagaactatcagactgagttgattaattcattagacgacaatgaaattatcgattgtatagttaataagtttatgagcttttataaggataacctagaaaatatagtagatgctatcattactctaaaatatataatgaataatccagattttaaaactacgtatgccgaagtactcggttccagaatagccgatatagatattaaacaagtgatacgtaagaatatactacaattgtctaataatatccgcgaacgatatttgtgaaaatattaaaaaaaaatactttttttattaaatgacgtcttttcgtgaatttagaaaattatgctgtgctatatatcacgcatcaggatataaagaaaaatctaaattaattagagactttataacagatagggatgataaatatttgatcattaagctattgcttcccggattagacgatagaatttataacatgaacgataaacaaattataaaattatatagtataatatttaaacaatctcaggaagatatgctacaagatttaggatacggatatataggagacactattaggactttcttcaaagagaacacagaaatccgtccacgagataaaagcattttaactttagaagaagtggatagttttttaactacgttatcatccgtaactaaagaatcgcatcaaataaaattattgactgatgtagcatctgtttgtacatgtaatgatttaaaatgtgtagtcatgcttattgataaagatctaaaaattaaagcgggtcctcggtacgtacttaacgctattagtcctaatgcctatgatgtgtttagaaaatctaataacttgaaagagataatagaaaattcatctaaacaaaatctagactctatatctatttctgttatgactccaattaatcccatgttagcggaatcgtgtgattctgtcaataaggcgtttaaaaaatttccatcaggaatgtttgcggaagtcaaatacgatggtgaaagagtacaagttcataaaaataataacgagtttgccttctttagtagaaacatgaaaccagtactctctcataaagtggattatctcaaagaatacataccgaaagcatttaaaaaagctacgtctatcgtattggattctgaaattgttcttgtagacgaacataatgtaccgctcccgtttggaagtttaggtatacacaaaaagaaagaatataaaaactctaacatgtgtttgttcgtgtttgactgtttgtactttgatggattcgatatgacggacattccattgtacgaacgaagatcttttctcaaagatgttatggttgaaatacccaatagaatagtattctcagagttgacgaatattagtaacgagtctcagttaactgacgtattggatgatgcactaacgagaaaattagaaggattggtcttaaaagatattaatggagtatacgaaccgggaaagagaagatggttaaaaataaagcgagactatttgaacgagggttccatggcagattctgccgatttagtagtactaggtgcctactatggtaaaggagcaaagggtggtatcatggcagtctttctaatgggttgttacgacgatgaatccggtaaatggaagacggttaccaagtgttcaggacacgatgataatacgttaagggagttgcaagaccaattaaagatgattaaaattaacaaggatcccaaaaaaattccagagtggttagtagttaataaaatctatattcccgattttgtagtagaggatccgaaacaatctcagatatgggaaatttcaggagcagagtttacatcttccaagtcccataccgcaaatggaatatccattagatttcctagatttactaggataagagaggataaaacgtggaaagaatctactcatctaaacgatttagtaaacttgactaaatcttaatagttacatacaaactgaaaattaaaataacactatttagttggtggtcgccatggatggtgttattgtatactgtctaaacgcgctagtaaaacatggcgaggaaataaatcatataaaaaatgatttcatgattaaaccatgttgtgaaagagtttgtgaaaaagtcaagaacgttcacattggcggacaatctaaaaacaatacagtgattgcagatttgccatatatggataatgcggtatccgatgtatgcaattcactgtataaaaagaatgtatcaagaatatccagatttgctaatttgataaagatagatgacgatgacaagactcctactggtgtatataattattttaaacctaaagatgccattcctgttatcatatctataggaaaggataaagatgtctgtgaactattaatctcatcagacatatcgtgtgcatgcgtggagttaaattcatatcacgtagccattcttcccatggatgtttccttttttaccaaaggaaatgcatcattgattattctcctgtttgatttctctatcgatgcggcacctctcttaagaagtgtaaccgataataatgttattatatctagacaccagcgtctacatgacgagcttccgagttccaattggttcaagttttacataagtataaagtccgactattgttctatattatatatggttgttgatggatctgtgatgcatgcgatagctgataatagaactcacgcaattattagcaaaaatatattagacaatactacgattaacgatgagtgtagatgctgttattttgaaccacagattaggattcttgatagagatgagatgctcaatggatcatcgtgtgatatgaacagacattgtattatgatgaatttacctgatgtaggcgaatttggatctagtatgttggggaaatatgaacctgacatgattaagattgctctttcggtggctggtaatttaataagaaatcgagactacattcccgggagacgaggatatagctactacgtttacggtatagcctctagataatttttttaagcacgaaataaaaaacataattttaaaccaatctatttcatactattttgtgtgatcaccatggacataaagatagatattagtatttctggtgataaatttacggtgactactaggagggaaaatgaagaaagaaaaaaatatctacctctccaaaaagaaaaaactactgatgttatcaaacctgattatcttgagtacgatgacttgttagatagagatgagatgtttactattctagaggaatattttatgtacagaggtctattaggcctcagaataaaatatggacgactctttaacgaaattaaaaaattcgacaatgatgcggaagaacaattcggtactatagaagaactcaagcagaaacttagattaaattctgaagagggagcagataactttatagattatataaaggtacaaaaacaggatatcgtcaaacttactgtatacgattgcatatctatgataggattgtgtgcatgcgtggtagatgtttggagaaatgagaaactgttttctagatggaaatattgtttacgagcgattaaactgtttattgatgatcacatgcttgataagataaaatctatactgcagaatagactagtatatgtggaaatgtcatagaaagttaaaagttaatgagagcaaaaatatataaggttgtattccatatttgttatttttttctgtaatagttagaaaaatacattcgatggtctatctatcagattattatgtgttataaggtactttttctcataataaactagagtatgagtaagatagtgtttttcaaaacatataaatctaaaattgatggatgagatatacagctattaatttcgaaaatatattttaatctgataactttaaacatggatttttaatggtggtttaacgttttaaaaaaagattttgttattgtagtatatgataatattaaaagatggatataaagaatttgctgactgcatgtactattttttacattactacattggctacggcagatatacctacttcgtcactgccacacgctccggtaaacggggcatgtgacgagggagaatatcttgataagaggcataatcaatgttgtaatcagtgtccacctggagaatttgccaaggttagatgtaatggtaacgataacacaaaatgtgaacgctgcccacctcatacatataccgcaatccccaattactctaatggatgtcatcaatgtagaaaatgcccaacaggatcatttgataaggtaaagtgtaccggaacacagaacagtaaatgttcgtgtcttcctggttggtattgcgctactgattcttcacagactgaagattgtcgagattgtataccaaaaaggagatgtccatgcggatactttggtggaatagatgaacaaggaaatcctatttgtaaatcgtgttgtgttggtgaatattgcgactacctacgtaattatagacttgatccatttcctccatgcaaactatctaaatgtaattaattatgattttgatgataatgttaccatacattatatcgctacttggttagtgtattattcagtatgaagacctattaataattacttatcttttgacgatcttgttataattataatataaaaatacttatggcatagtaactcataattgctgacgcgataaattcgtaataatctgttttgttcaaatttttataaggaatctacaggcataaaaataaaaatataatttataatatactcttacagcgcgccatcatgaataacagcagtgaattgattgctgttattaatggatttagaaatagtggacgattttgtgatattaatatagttattaatgatgaaaggataaacgctcacagactcatcctatctggagcctccgaatatttttccattctgttttccaataattttatcgattctaatgaatacgaagttaatctaagtcatttagattatcaaagtgttaacgatttgatcgattacatttatgggatacctttgagcctaactaacgataacgtgaaatatattctttcaaccgctgattttttacaaattggatctgctattacggagtgtgaaaattacatacttaaaaatctttgttctagaaactgtatcgatttctacatatacgctgataaatataataacaagaaaatagaatcagcgtcgtttaacacaatattacaaaatattttgagactcatcaacgatgaaaactttaaatacttaacagaggaatcaatgataaaaattttaagcgatgatatgttaaatataaaaaatgaggatttcgccccactaattctcattaaatggttagagagtactcaacaaccatgcaccgtcgagttacttaaatgcctcagaatatcattgctttccccacaagttataaaatcactttatagtcatcgactggttagttcaatctacgaatgtataacattcttaaacaatatagcattcttggatgaatcatttcctagataccatagcatcgagttgatatctatcggtataagtaattcgcatgataagatttccataaactgctacaatcataaaaaaaatacatgggaaatgatatcttcacgtagatataggtgtagtttcgcagtggccgtcctggataatattatctatatgatgggtggatatgatcagtccccgtatagaagttcaaaggttatagcgtacaatacatgtacaaattcttggatatatgatataccagagctaaaatatcctcgttctaattgtgggggactggctgatgacgaatacatttattgtataggcggcatacgcgatcaggattcatcgttgacatctagtattgatagatggaagccatcaaaaccatattggcagaagtatgctaaaatgcgcgaaccaaaatgtgatatgggggttgcgatgttaaacggattaatatatgttataggtggaatcgttaaaggtgacacgtgtaccgacgcactagagagtttatcagaagatggatggatgaagcatcaacgtcttccaataaaaatgtccaatatgtcgacgattgttcatgatggcaagatttatatatctggaggttacaacaatagtagtgtagttaatgtaatatcgaatctagtccttagctataattcgatatatgatgaatggaccaaattatcatcattaaacattcctagaattaatcccgctctatggtcagcgcataataaattatatgtaggaggaggaatatctgatgatgttcgaactaatacatctgagacatacgacaaagaaaaagattgttggacattggataatggtcacgtgttaccacgcaattatataatgtataaatgcgaaccgattaaacataaatatccattggaaaaaacacagtacacgaatgattttctaaagtatttggaaagttttataggtagttgatagaacaaaatacataattttgtaaaaataaatcactttttatactaatatgacacgattaccaatacttttgttactaatatcattagtatacgctacaccttttcctcagacatctaaaaaaataggtgatgatgcaactctatcatgtaatcgaaataatacaaatgactacgttgttatgagtgcttggtataaggagcccaattccattattcttttagctgctaaaagcgacgtcttgtattttgataattataccaaggataaaatatcttacgactctccatacgatgatctagttacaactatcacaattaaatcattgactgctagagatgccggtacttatgtatgtgcattctttatgacatcaactacaaatgacactgataaagtagattatgaagaatactccacagagttgattgtaaatacagatagtgaatcgactatagacataatactatctggatctacacattcaccggaaactagttctaagaaacctgattatatagataattctaattgctcgtcggtattcgaaatcggtacccggggatcagcttgcatgcctgcagcaattcccgaggctgtagccgacgatggtgcgccaggagagttgttgattcattgtttgcctccctgctgcggtttttcaccgaagttcatgccagtccagcgtttttgcagcagaaaagccgccgacttcggtttgcggtcgcgagtgaagatccctttcttgttaccgccaacgcgcaatatgccttgcgaggtcgcaaaatcggcgaaattccatacctgttcaccgacgacggcgctgacgcgatcaaagacgcggtgatacatatccagccatgcacactgatactcttcactccacatgtcggtgtacattgagtgcagcccggctaacgtatccacgccgtattcggtgatgataatcggctgatgcagtttctcctgccaggccagaagttctttttccagtaccttctctgccgtttccaaatcgccgctttggacataccatccgtaataacggttcaggcacagcacatcaaagagatcgctgatggtatcggtgtgagcgtcgcagaacattacattgacgcaggtgatcggacgcgtcgggtcgagtttacgcgttgcttccgccagtggcgcgaaatattcccgtgcaccttgcggacgggtatccggttcgttggcaatactccacatcaccacgcttgggtggtttttgtcacgcgctatcagctctttaatcgcctgtaagtgcgcttgctgagtttccccgttgactgcctcttcgctgtacagttctttcggcttgttgcccgcttcgaaaccaatgcctaaagagaggttaaagccgacagcagcagtttcatcaatcaccacgatgccatgttcatctgcccagtcgagcatctcttcagcgtaagggtaatgcgaggtacggtaggagttggccccaatccagtccattaatgcgtggtcgtgcaccatcagcacgttatcgaatcctttgccacgcaagtccgcatcttcatgacgaccaaagccagtaaagtagaacggtttgtggttaatcaggaactgttcgcccttcactgccactgaccggatgccgacgcgaagcgggtagatatcacactctgtctggcttttggctgtgacgcacagttcatagagataaccttcacccggttgccagaggtgcggattcaccacttgcaaagtcccgctagtgccttgtccagttgcaaccacctgttgatccgcatcacgcagttcaacgctgacatcaccattggccaccacctgccagtcaacagacgcgtggttacagtcttgcgcgacatgcgtcaccacggtgatatcgtccacccaggtgttcggcgtggtgtagagcattacgctgcgatggattccggcatagttaaagaaatcatggaagtaagactgctttttcttgccgttttcgtcggtaatcaccattcccggcgggatagtctgccagttcagttcgttgttcacacaaacggtgatacgtacacttttcccggcaataacatacggcgtgacatcggcttcaaatggcgtatagccgccctgatgctccatcacttcctgattattgacccacactttgccgtaatgagtgaccgcatcgaaacgcagcacgatacgctggcctgcccaacctttcggtataaagacttcgcgctgataccagacgttgcccgcataattacgaatatctgcatcggcgaactgatcgttaaaactgcctggcacagcaattgcccggctttcttgtaacgcgctttcccaccaacgctgatcaattccacagttttcgcgatccagactgaatgcccacaggccgtcgagttttttgatttcacgggttggggtttctacaggacgtaacattctagtcgaggaattcatttatagcatagaaaaaaacaaaatgaaattctactatatttttacatacatatattctaaatatgaaagtggtgattgtgactagcgtagcatcgcttctagacatctatatactatatagtaataccaatactcaagactacgaaactgatacaatctcttatcatgtgggtaatgttctcgatgtcgatagccatatgcccggtagttgcgatatacataaactgatcactaattccaaacccacccgctttttatagtaagtttttcacccataaataataaatacaataattaatttctcgtaaaagtagaaaatatattctaatttattgcacggtaaggaagtagaatcataaagaacagtgacggatccccgatccccgacctgcaggcatgcaagctcgactccggaaccaattactgataatgtagaagatcatacagacaccgtcacatacactagtgatagcattaatacagtaagtgcatcatctggagaatccacaacagacgagactccggaaccaattactgataaagaagatcatacagttacagacactgtctcatacactacagtaagtacatcatctggaattgtcactactaaatcaaccaccgatgatgcggatctttatgatacgtacaatgataatgatacagtaccaccaactactgtaggcggtagtacaacctctattagcaattataaaaccaaggactttgtagaaatatttggtattaccgcattaattatattgtcggccgtggcaattttctgtattacatattatatatataataaacgttcacgtaaatacaaaacagagaacaaagtctagatttttgacttacataaatgtctgggatagtaaaatctatcatattgagcggaccatctggtttaggaaagacagccatagccaaaagactatgggaatatatttggatttgtggtgtcccataccactagatttcctcgtcctatggaacgagaaggtgttgattaccattacgttaacagagaggccatctggaagggaatagccgccggaaactttctagaacatactgagtttttaggaaatatttacggaacttctaaaacagctgtgaatacagcggctattaataatcgtatttgtgtgatggatctaaacatcgacggtgttagaagtcttaaaaatacgtacctaatgccttactcggtgtatataagacctacctctcttaaaatggttgagaccaagcttcgtcgtagaaacactgaagctaacgatgagattcatcgtcgtgtgatgttggcaaaaactgacatggatgaggcaggtgaagccggtctattcgacactattatcattgaagatgatgtgaatttagcatatagtaagttaattcagatactacaggaccgtattagaatgtattttaacactaattagagacttaagacttaaaacttgataattaataatataactcgtttttatatgtgtctatttcaacgtctaatgtattagttaaatattaaaacttaccacgtaaaacttaaaatttaaaatgatatttcattgacagatagatcacacattatgaactttcaaggacttgtgttaactgacaattgcaaaaatcaatgggtcgttggaccattaataggaaaaggtggattcggtagtatttatactactaatgacaataattatgtagtaaaaatagagcccaaagctaacggatcattatttaccgaacaggcattttatactagagtacttaaaccatccgttatcgaagaatggaaaaaatctcacaatataaagcacgtaggtcttatcacgtgcaaggcatttggtctatacaaatccattaatgtggaatatcgattcttggtaattaatagattaggtgcagatctagatgcggtgatcagagccaataataatagactaccaaaaaggtcggtgatgttgatcggaatcgaaatcttaaataccatacaatttatgcacgagcaaggatattctcacggagatattaaagcgagtaatatagtcttagatcaaatagataagaataaattatatctagtggattacggattggtttctaaattcatgtctaatggcgaacatgttccatttataagaaatccaaataaaatggataacggtactctagaatttacacctatagattcgcataaaggatacgttgtatctagacgtggagatctagaaacacttggatattgtatgattagatggttgggaggtatcttaccatggactaagatatctgaaacaaagaattgtgcattagtaagtgccacaaaacagaaatatgttaacaatactgcgactttgttaatgaccagtttgcaatatgcacctagagaattgctgcaatatattaccatggtaaactctttgacatattttgaggaacccaattacgacaagtttcggcacatattaatgcagggtgtatattattaagtgtggtgtttggtcgataaaaattaaaaaataacttaatttattattgatctcgtgtgtacaaccgaaatcatggcgatgttttacgcacacgctctcggtgggtacgacgagaatcttcatgcctttcctggaatatcatcgactgttgccaatgatgtcaggaaatattctgttgtgtcagtttataataacaagtatgacattgtaaaagacaaatatatgtggtgttacagtcaggtgaacaagagatatattggagcactgctgcctatgtttgagtgcaatgaatatctacaaattggaaatccgatccatgatcaagaaggaaatcaaatctctatcatcacatatcgccacaaaaactactatgctctaagcggaatcgggtacgagagtctagacttgtgtttggaaggagtagggattcatcatcacgtacttgaaacaggaaacgctgtatatggaaaagttcaacatgattattctactatcaaagagaaggccaaagaaatgagtgcacttagtccaggacctatcatcgattaccacgtctggataggagattgtatctgtcaagttactgctgtggacgtacatggaaaggaaattatgaaaatgagattcaaaaagggtgcggtgcttccgatcccaaatctggtaaaagttaaacttggggagaatgatacagaaaatctttcttctactatatcggcggcaccatcgaggtaaccacctctctggaagacagcgtgaatcatgtactcatgaaacgtttggaaactatacgccatatgtggtctgttgtatatgatcattttgatattgtgaatggtaaagaatgctgttatgtgcatacgcattcatctaatcaaaatcctataccgagtactgtaaaaacaaatttgtacatgaagactatgggatcatgcattcaaatggattccatggaagctctagagtatcttagcgaactgaaggaatcaggtggatggagtcccagaccagaaatgcaggaatttgaatatccagatggagtggaagacactgaatcaattgagagattggcagaggagttcttcaatagatcagaacttcaggctggtgaatcagtcaaatttggtaattctattaattgttaaacatacatctgtttcagctaagcaactaagaacacgtatacggcagcagcttccttctatactctcatcttttaccaacacaaagggtggatatttgttcattggagttgataataatacacacaaagtatttggattcacggtgggttacgactacctcagactgatagagaatgatatagaaaagcatatcaaaagacttcgtgttgtgcatttctgtgagaagaaagaggacatcaagtacgcgtgtcgattcatcaaggtatataaacctggggatgagactacctcgacatacgtgtgcgctatcaaagtggaaagatgctgttgtgctgtgtttgcagattggccagaatcatggtatatggatactaatggtatcaagaagtattctccagatgaatgggtgtcacatataaaattttaattaatgtaactatagagaacaaataataaggttgtaatatcatatagacaataactaacaattaattagtaactgttatctcttttttaactaaccaactaactatatacctattaatacatcgtaattatagttcttaacatctattaatcattaattcgcttctttaattttttataaactaacattgttaattgaaaagggataacatgttacagaatataaattatatatggatttttttaaaaaggaaatacttgactggagtatatatttatctcttcattatatagcacgcgtgttttccaatttttccacatcccatataatacaggattataatctcgttcgaacatacgagaaagtggataaaacaatagttgattttttatctaggttgccaaatttattccatattttagaatatggggaaaatattctacatatttattctatggatgatgctaatacgaatattataattttttttctagatagagtattaaatattaataagaacgggtcatttatacacaatctcgggttatcatcatccattaatataaaagaatatgtatatcaattagttaataatgatcatccagataataggataagactaatgcttgaaaatggacgtagaacaagacattttttgtcctatatatcagatacagttaatatctatatatgtattttaataaatcatggattttatatagatgccgaagacagttacggttgtacattattacatagatgtatatatcactataagaaatcagaatcagaatcatacaatgaattaattaagatattgttaaataatggatcagatgtagataaaaaagatacgtacggaaacacaccttttatcctattatgtaaacacgatatcaacaacgtggaattgtttgagatatgtttagagaatgctaatatagactctgtagactttaatagatatacacctcttcattatgtctcatgtcgtaataaatatgattttgtaaagttattaatttctaaaggagcaaatgttaatgcgcgtaataaattcggaactactccattttattgtggaattatacacggtatctcgcttataaaactatatttggaatcagacacagagttagaaatagataatgaacatatagttcgtcatttaataatttttgatgctgttgaatctttagattatctattatccagaggagttattgatattaactatcgtactatatacaacgaaacatctatttacgacgctgtcagttataatgcgtataatacgttggtctatctattaaacaaaaatggtgattttgagacgattactactagtggatgtacatgtatttcggaagcagtcgcaaacaacaacaaaataataatggaagtactattgtctaaacgaccatctttgaaaattatgatacagtctatgatagcaattactaaacataaacagcataatgcagatttattgaaaatgtgtataaaatatactgcgtgtatgaccgattatgatactcttatagatgtacagtcgctacagcaatataaatggtatattttaagatgtttcgatgaaatagatatcatgaagagatgttatataaaaaataaaactgtattccaattagttttttgtatcaaagacattaatactttaatgagatacggtaaacatccttctttcgtgaaatgcactagtctcgacgtatacggaagtcgtgtacgtaatatcatagcatctattagatatcgtcagagattaattagtctattatccaagaagctggatcctggagataaatggtcgtgttttcctaacgaaataaaatataaaatattggaaaactttaacgataacgaactatccacatatctaaaaatcttataaacattattaaaatataaaatctaagtaggataaaatcacactacatcattgtttccttttagtgctcgacagtgtatactatttttaacgctcataaataaaaatgaaaacgatttccgttgttacgttgttatgcgtactacctgctgttgtttattcaacatgtactgtacccactatgaataacgctaaattaacgtctaccgaaacatcgtttaatgataaccagaaagttacgtttacatgtgatcagggatatcattctttggatccaaatgctgtctgtgaaacagataaatggaaatacgaaaatccatgcaaaaaaatgtgcacagtttctgattatgtctctgaactatataataaaccgctatacgaagtgaattccaccatgacactaagttgcaacggcgaaacaaaatattttcgttgcgaagaaaaaaatggaaatacttcttggaatgatactgttacgtgtcctaatgcggaatgtcaacctcttcaattagaacacggatcgtgtcaaccagttaaagaaaaatactcatttggggaatatatgactatcaactgtgatgttggatatgaggttattggtgcttcgtacataagttgtacagctaattcttggaatgttattccatcatgtcaacaaaaatgtgatatgccgtctctatctaacggattaatttccggatctacattttctatcggtggcgttatacatcttagttgtaaaagtggttttacactaacggggtctccatcatccacatgtatcgacggtaaatggaatcccatactcccaatatgtgtacgaactaacgaaaaatttgatccagtggatgatggtcccgacgatgagacagatttgagcaaactctcgaaagacgttgtacaatatgaacaagaaatagaatcgttagaagcaacttatcatataatcatagtggcgttgacaattatgggcgtcatatttttaatctccgttatagtattagtttgttcctgtgacaaaaataatgaccaatataagttccataaattgctaccgtaaatataaatccgttaaaataattaataatttaataacaaacaagtatcaaaagattaaagacttatagctagaatcaattgagatgtcttcttcagtggatgttgatatctacgatgccgttagagcatttttactcaggcactattataacaagagatttattgtgtatggaagaagtaacgccatattacataatatatacaggctatttacaagatgcgccgttataccgttcgatgatatagtacgtactatgccaaatgaatcacgtgttaaacaatgggtgatggatacacttaatggtataatgatgaatgaacgcgatgtttctgtaagcgttggcaccggaatactattcatggaaatgtttttcgattacaataaaaatagtatcaacaatcaactaatgtatgatataattaatagcgtatctataattctagctaatgagagatatagaagcgcttttaacgacgatggtatatacatccgtagaaatatgattaacaagttgtacggatacgcatctctaactactattggcacgatcgctggaggtgtttgttattatctgttgatgcatctagttagtttgtataaataattatttcaatatactagttaaaattttaagattttaaatgtataaaaaactaataacgtttttatttgtaataggtgcattagcatcctattcgaataatgagtacactccgtttaataaactgagtgtaaaactctatatagatggagtagataatatagaaaattcatatactgatgataataatgaattggtgttaaattttaaagagtacacaatttctattattacagagtcatgcgacgtcggatttgattccatagatatagatgttataaacgactataaaattattgatatgtataccattgactcgtctactattcaacgcagaggtcacacgtgtagaatatctaccaaattatcatgccattatgataagtacccttatattcacaaatatgatggtgatgagcgacaatattctattactgcagagggaaaatgctataaaggaataaaatatgaaataagtatgatcaacgatgatactctattgagaaaacatactcttaaaattggatctacttatatatttgatcgtcatggacatagtaatacatattattcaaaatatgatttttaaaaatttaaaatatattatcacttcagtgacagtagtcaaataacaaacaacaccatgagatatattataattctcgcagttttgttcattaatagtatacatgctaaaataactagttataagtttgaatccgtcaattttgattccaaaattgaatggactggggatggtctatacaatatatcccttaaaaattatggcatcaagacgtggcaaacaatgtatacaaatgtaccagaaggaacatacgacatatccgcatttccaaagaatgatttcgtatctttctgggttaaatttgaacaaggcgattataaagtggaagagtattgtacgggactatgcgtcgaagtaaaaattggaccaccgactgtaacattgactgaatacgacgaccatatcaatttgtacatcgagcatccgtatgctactagaggtagcaaaaagattcctatttacaaacgcggtgacatgtgtgatatctacttgttgtatacggctaacttcacattcggagattctaaagaaccagtaccatatgatatcgatgactacgattgcacgtctacaggttgcagcatagactttgtcacaacagaaaaagtgtgcgtgacagcacagggagccacagaagggtttctcgaaaaaattactccatggagttcgaaagtatgtctgacacctaaaaagagtgtatatacatgcgcaattagatccaaagaagatgttcccaatttcaaggacaaaatggccagagttatcaagagaaaatttaatacacagtctcaatcttatttaactaaatttctcggtagcacatcaaatgatgttaccacttttcttagcatgcttaacttgactaaatattcataactaatttttattaatgatacaaaaacgaaataaaactgcatattatacactggttaacgcccttataggctctaaccattttcaagatgaggtccctgattatagtccttctgttcccctctatcatctactccatgtctattagacgatgtgagaagactgaagaggaaacatggggattgaaaatagggttgtgtataattgccaaagatttctatcccgaaagaactgattgcagtgttcatctcccaactgcaagtgaaggattgataactgaaggcaatggattcagggatatacgaaacaccgataaattataaaaaaagcaatgtgtccgctgtttccgttaataatactattttcgtaactggcggattattcataaataactctaatagcacgatcgtggttaacaatatggaaaaacttgacatttataaagacaaacaatggtcgattatagaaatgcctatggctagggtatatcacggcattgactcgacatttggaatgttatattttgccggaggtctatccgttaccgaacaatatggtaatttagagaaaaacaacgagatatcttgttacaatcctagaacgaataagtggtttgatatttcatatactatttataagatatccatatcatcattgtgtaaactaaataacgtcttctatgtatttagtaaggacattggatatgtggaaaagtatgatggtgcatggaagttagtacatgatcgtctccccgctataaaggcattatcaacttctccttattgattgaaaatgaaaatataaatagtttttatgtatagcagtattaccctatagttttattgcttactactaacatggatacagatgttacaaatgtagaagatatcataaatgaaatagatagagagaaagaagaaatactaaaaaatgtagaaattgaaaataataaaaacattaacaagaatcatcccaatgaatatattagagaagcactcgttattaataccagtagtaatagtgattccattgataaagaagttatagaatgtatcagtcacgatgtaggaatatagatcatatctactaatttttataatcgatacaaaacataaaaaacaactcgttattacatagcaggcatggaatccttcaagtattgttttgataacgatggcaagaaatggattatcggaaatactttatattctggtaattcaatactctataaggtcagaaaaaatttcactagttcgttctacaattacgtaatgaagatagatcacaaatcacacaagccattgttgtctgaaatacgattctatatatctgtattggatcctttgactatcgacaactggacacgggaacgtggtataaagtatttggctattccagatctgtatggaattggagaaaccgatgattatatgttcttcgttataaagaattcgggaagagtattcgccccaaaggatactgaatcagtcttcgaagcatgcgtcactatgataaacacgttagagtttatacactctcgaggatttacccatggaaaaatagaaccgaggaatatactgattagaaataaacgtctttcactaattgactattctagaactaacaaactatacaagagtggaaactcacatatagattacaacgaggacatgataacttcaggaaatatcaattatatgtgtgtagacaatcatcttggagcaacagtttcaagacgaggagatttagaaatgttgggatattgcatgatagaatggttcggtggcaaacttccatggaaaaacgaaagtagtataaaagtaataaaacaaaaaaaagaatataaaaaatttatagctactttctttgaggactgttttcctgaaggaaatgaacctctggaattagttagatatatagaattagtatacacgttagattattctcaaactcctaattatgacagactacgtaaactgtttatacaagattgaaattatattcttttttttatagagtgtggtagtgttacggatatctaatattaatattagactatctctatcgcgctacacgaccaatatcgattactatggatatcttctatgaaaggagagaatgtatttatttctccagcgtcaatctcgtcagtattgacaatactgtattatggagctaatggatccactgctgaacagctatcaaaatatgtagaaacggaggagaacacggataaggttagcgctcagaatatctcattcaaatccatgaataaagtatatgggcgatattctgccgtgtttaaagattcctttttgagaaaaattggcgataagtttcaaactgttgacttcactgattgtcgcactatagatgcaatcaacaagtgtgtagatatctttactgaggggaaaatcaatccactattggatgaaccattgtctcctagcaattagtgccgtatactttaaagcaaaatggttgacgccattcgaaaaggaatttaccagtgattatcccttttacgtatctccgacggaaatggtagacgtaagtatgatgtctatgtacggcaaggcatttaatcacgcatctgtaaaagaatcattcggcaacttttcaatcatagaactgccatatgttggagatactagtatgatggtcattcttccagacaagattgatggattagaatccatagaacaaaatctaacagatacaaattttaagaaatggtgtgactttatggatgctatgtttatagatgttcacattcccaagtttaaggtaacaggctcgtataatctggtggatactctagtaaagtcaggactgacagaggtgttcggttcaactggagattatagcaatatgtgtaatttagatgtgagtgtcgacgctatgatccacaaaacgtatatagatgtcaatgaagagtatacagaagcagctgcagcaacttctgtactagtggcagactgtgcatcaacaattacaaatgagttctgtgcagatcatccgttcatctatgtgattaggcatgttgatggaaaaattcttttcgttggtagatattgctctccgacaactaattgttaaccattttttttaaaaaaaatagaaaaaacatgtggtattagtgcaggtcgttgttcttccaattgcaattggtaagatgacggccaactttagtacccacgtcttttcaccacagcactgtggatgtgacagactgaccagtattgatgacgtcaaacaatgtttgactgaatatatttattggtcgtcctatgcataccgcaacaggcaatgcgctggacaattgtattccacactcctctcttttagagatgatgcggaattagtgttcatcgacattcgcgagctggtaaaaaatatgccgtgggatgatgtcaaagattgtacagaaatcatccgttgttatataccggatgagcaaaaaaccatcagagagatttcggccatcatcggactttgtgcatatgctgctacttactggggaggtgaagaccatcccactagtaacagtctgaacgcattgtttgtgatgcttgagatgctaaattacgtggattataacatcatattccggcgtatgaattgatgagttgtacatcttgacattttctttcttctcttctccctttcttctcttctcccttcctccctcttctccctttcccagaaacaaacttttttacccactataaaataaaatgagtatactacctattatatttcttcctatatttttttattcttcattcgttcagacttttaacgcgtctgaatgtatcgacaaagggcaatattttgcatcattcatggagttagaaaacgagccagtaatcttaccatgtcctcaaataaatacgctatcatccggatataatatattagatattttatgggaaaaacgaggagcggataatgatagaattataccgatagataatggtagcaatatgctaattctgaacccgacacaatcagactctggtatttatatatgcattaccacgaacgaaacctactgtgacatgatgtcgttaaatttgacaatcgtgtctgtctcagaatcaaatatagatcttatctcgtatccacaaatagtaaatgagagatctactggcgaaatggtatgtcccaatattaatgcatttattgctagtaacgtaaacgcagatattatatggagcggacatcgacgccttagaaataagagacttaaacaacggacacctggaattattaccatagaagatgttagaaaaaatgatgctggttattatacatgtgttttagaatatatatacggtggcaaaacatataacgtaaccagaattgtaaaattagaggtacgggatagaataataccttctactatgcaattaccagatggcattgtaacttcaataggtagtaatttgactattgcatgcagagtatcgttgagacctcccacaacggacaccgacgtcttttggataagtaatggtatgtattacgaagaagatgatggggacggaaacggtagaataagtgtagcaaataaaatctatatgaccgataagagacgtgttattacatcccggttaaacattaatcctgtcaaggaagaagatgctacaacgtttacgtgtatggcgtttactattcctagcatcagcaaaacagttactgttagtataacgtgaatgtatgttgttacatttccatgtcaattgagtttataagaatttttatacattatcttccaacaaacaattgacgaacgtattgctatgattaactcccacgatactatgcatattattaatcattaacttgcagactatacctagtgctattttgacatactcgtgttcttgtgtaattgcggtatctatattattaaagtacgtaaatctagctatagttttattatttaattttagataatataccgtctccttatttttaaaaattgccacatcctttattaaatcatgaatgggaatttctatgtcatcgttagtatattgtgaacaacaagagcagatatctataggaaagggtggaatgcgatacattgatctatgtagttttaaaacacacgcgaactttgaagaatttatataaatcattccatcgatacatccttctatgttgacatgtatatatccaggaattcttttattaatgtcaggaaatgtataaactaaaacattgcccgaaagcggtgcctctatctgcgttatatccgttcttaacttacaaaatgtaaccaatacctttgcatgacttgttttgttcggcaacgttagtttaaacttgacgaatggattaattacaatagcatgatccgcgcatctattaagtttttttactttaacgcccttgtatgtttttacagagactttatctaaatttctagtgcttgtatgtgttataaatataacgggatatagaaccgaatcacctaccttagatacccaattacattttatcagatccagataataaacaaattttgtcgccctaactaattctatattgttatatattttacaattggttatgatatcatgtaataacttggagtctaacgcgcatcgtcgtacgtttatacaattgtgatttagtgtagtatatctacacatgtatttttccgcactatagtattctggactagtgataaaactatcgttatatctgtcttcaatgaactcatcgagatattgctctctgtcatattcatacacctgcataaactttctagacatcttacaatccgtgttattttaggatcatatttacatatttacgggtatatcaaagatgttagattagttaatgggaatcgtctataataatgaatattaaacaattatatgaggacttttaccacaaagcatcataaaaatgagtcgtcgtctgatttatgttttaaatatcaaccgcaaatcaactcataaaatacaagagaatgaaatatatacatattttagtcattgcaatatagaccatacttctacagaacttgattttgtagttaaaaactatgatctaaacagacgacaacctgtaactgggtatactgcactacactgctatttgtataataattactttacaaacgatgtactgaagatattattaaatcatgacgtaaatgtaacgatgaaaaccagtagcggacgtatgcctgtttatatattgcttactagatgttgtaatatttcacatgatgtagtgatagatatgatagacaaagataaaaaccacttattacatagagactattccaacctattactagagtatataaaatctcgttacatgttattgaaggaagaggatatcgatgagaacatagtatccactttattagataagggaatcgatcctaactttaaacaagacggatatacagcgttacattattattatttgtgtctcgcacacgtttataaactaggtgagtgtagaaaaccgataacgataaaaaaggccaagcgaattatttctttgtttatacaacatggagctaatctaaacgcgttagataattgtggtaatacaccattccatttgtatcttagtattgaaatgtgtaataatattcatatgactaaaatgctgttgacttttaatccgaatttcaaaatatgtaataatcatggattaacgcctatactatgttatataacttccgactacatacaacacgatattcttgttatgttaatacatcactatgaaacaaatgttggagaaatgccgatagatgagcgtcgtatgatcgtattcgagtttatcaaaacatattctacacgtccggcagattcgataacttatttgatgaataggtttaaaaatataaatatttatacccgctatgaaggaaagacattattacacgtagcatgtgaatataataatacacaagtaatagattatcttatacgtatcaacggagatataaatgcgttaaccgacaataacaaacacgctacacaactcattatagataacaaagaaaattccccatataccattaattgtttactgtatatacttagatatattgtagataagaatgtgataagatcgttggtggatcaacttccatctctacctatcttcgatataaaatcatttgagaaattcatatcctactgtatacttttagatgacacattttacgataggcacgttaagaatcgcgattctaaaacgtatcgatacgcattttcaaaatacatgtcgtttgataaatacgatggtataataactaaatgtcacgacgaaacaatgttactcaaactgtccactgttctagacactacactatatgcagttttaagatgtcataattcgagaaagttaagaagatacctcaacgagttaaaaaaatataataacgataagtcctttaaaatatattctaatattatgaatgagagataccttaatgtatattataaagatatgtacgtgtcaaaggtatatgataaactatttcctgttttcacagataaaaattgtctactaacattactaccttcagaaattatatacgaaatattatacatgctgacaattaacgatctttataatatatcgtatccacctaccaaagtatagttgtatttttctcatgcgatgtgtgtaaaaaaactgatattatataaatattttagtgccgtataataaagatgacgatgaaaatgatggtacatatatatttcgtatcattattgttattgctattccacagttacgccatagacatcgaaaatgaaatcacagaattcttcaataaaatgagagatactctaccagctaaagactctaaatggttgaatccagcatgtatgttcggaggcacaatgaatgatatagccgctctaggagagccattcagcgcaaagtgtcctcctattgaagacagtcttttatcgcacagatataaagactatgtggttaaatgggagaggctagaaaagaatagacggcgacaggtttctaataaacgtgttaaacatggtgatttatggatagccaactatacatctaaattcagtaaccgtaggtatttgtgcaccgtaactacaaagaatggtgactgtgttcagggtatagttagatctcatattaaaaaacctccttcatgcattccaaaaacatatgaactaggtactcatgataagtatggcatagacttatactgtggaattctttacgcaaaacattataataatataacttggtataaagataataaggaaattaatatcgacgacattaagtattcacaaacgggaaaggaattaattattcataatccagagttagaagatagcggaagatacgactgttacgttcattacgacgacgttagaatcaagaatgatatcgtagtatcaagatgtaaaatacttacggttataccgtcacaagaccacaggtttaaactaatactagatccgaaaatcaacgtaacgataggagaacctgccaatataacatgcactgctgtgtcaacgtcattattgatcgacgatgtactgattgaatgggaaaatccatccggatggcttataggattcgattttgatgtatactctgttttaactagtagaggcggtatcaccgaggcgaccttgtactttgaaaatgttactgaagaatatataggtaatacatataaatgtcgtggacacaactattattttgaaaaaacccttacaactacagtagtattggagtaaatatacaatgcatttttatatacattactgaattattattactgaattattattactgaattattattaattatatcgtatttgtgctatagaatggatgaagatacgcgactatctaggtatttgtatctcaccgatagagaacatataaatgtagactctattaaacagttgtgtaaaatatcagatcctaatgcatgttatagatgtggatgtacggctttacatgagtacttttataattatagatcagtcaacggaaaatacaagtatagatacaacggttactatcaatattattcatctagcgattatgaaaattataatgaatattattatgatagaactggtatgaacagtgagagtgataatatatcaatcaaaacagaatatgaattctatgatgaaacacaagatcaaagtacacaactagtaggttacgacattaaactcaaaaccaatgaggatgattttatggctatgatagatcagtgggtgtccatgattatatagatgaatcaattaataaagtagtatatggaagagagtctcacgtaagatggcgggatatatggcaagaacataatgatggcgtatacagtataggaaaggagtgcatagataatatatacgaagacaaccataccgtagacgaattctacaagatagacagcgtatcagatgtagatgacgcggaacacatatctccgataactaaaaaaccatagaatcagttgatgataatacctacatttctaatcttccgtataccatcaaatacaaaatattcgagcaacaataagtattttttatacctttaaaactgataaataaattttttctagtgatattttggcaagatgagaatcctatttctcatcgctttcatgtatgggtgtgttcactcatatgttaacgcggttgaaaccaaatgtccaaatctagacattgtaacatcttctggagaatttcattgttcaggatgtgtggaacatatgcctgagtttagctatatgtattggttggcaaaggatatgaaatcggacgaggataccaagtttatagaacatctgggtgatggcatcaaagaagatgaaaccgttcgtaccacagatagtggaatcgtcactctacgtaaagtccttcatgtgactgatactaataaatttgataattataggttcacttgtgtcctcgctacgctagatggcatttataaaaagaatgtttgctgaagtagttgtgtgctactatttttatttatgatataatctaatggaattaatttgaattgatatttatccaatactaaagattatattagaatcaaattaatcttttatacgagaaaaaataacgacatacgtcgtcaacaaattaaactttttatttattagttaactagcttatagaacttgctcattgttatgtttctaaaacgggtacggcatataggacaattatccgacgcaccggtttctcttcgtgttctatgccatatattgatgcatgttatgcaaaatatatgagtacacgaatccaataaaccaaagtatctatcgttttgagtaaacaacttcatagcaaattccacattctttttctttacttactctatacacgtcctcgtatttatttagtattttgatgatatccaactcagaaatggttgttgtattattgggtgtatttggagtataggtattattagctatgtaccaatttaccaaccctcttaatattgattgataatcacatcggttatccaattaataactaaattgtagtgtatatatagaccatatatgtttctatttttttgacagttacgtatagtttcagtaagttttgattgttgtattcctgtatctctagataagttagtcatatagtcccttccggcgatacgttttttccaagcccgaaattgattagccaaatgtgtatttatttttgtgatattgatataatatttcggataatgcatactgttagtcttatatcatttggttcatctatgtattgtaatattgttacatgatctatagatgatgtattgattttggcaggatcgaattccatatccgcgactaaacagtgaaaaaaatgtaaatactttttaaattttaaattagtaaaacttttttttattttttatgattccaaaaatactgaatacaaagtcctaaattataaatatggagatcatactaccacaacttattattatgtatacaaggccggtgtaatagatagatatatataattctattacaccggcagacaattaccgaccggtatttgtcgttaccaacataccgtataatatgtaatatacaattccataacccattgacagttgttatacatcaaaattgcaattcttttgattacgatgttataagaatgtagttaattgatgtatgatgttaatgtgtcctctttcctcttataacatcgtaatcaaaaacttttttataatatatacctaataatgtgtcttaatagttctcgtgattcgtcaaacaatcattcttataaaatataataaagcaacgtaaaaacacataaaaataagcgtaactaataagacaatggatatttacgacgataaaggtctacagactattaaactgtttaataatgaatttgattgtataaggaatgacatcagagaattatttaaacatgtaactgattccgatagtatacaacttccgatggaagacaattctgatattatagaaaatatcagaaaaatactatatagacgattaaaaaatgtagaatgtgttgacatcgataacacaataacttttatgaaatacgatccaaatgatgataataagcgtacgtgttctaattgggtacccttaactaataactatatggaatattgtctagtaatatatttggaaacaccgatatgtggaggcaaaataaaattataccaccctacaggaaatataaagtcggataaggatattatgtttgcaaagactctagactttaaatcaacgaaagtgttaactggacgtaaaacaattgccgttctagacatatccgtttcatataatagatcaatgactactattcactacaacgacgacgttgatatagatatacatactgataaaaatggaaaagagttatgttattgttatataacaatagatgatcattacttggttgatgtggaaactataggagttatagtcaatagatctggaaaatgtctgttagtaaataaccatctaggtataggtatcgttaaagataaacgtataagcgatagttttggagatgtatgtatggatacaatatttgacttttctgaagcacgagagttattttcattaactaatgatgataacaggaatatagcatgggacactgataaactagacgatgatacagatatatggactcccgtcacagaagatgattacaaatttctttctagactagtattgtatgcaaaatctcaatcggatactgtatttgactattatgttcttactggtgatacggaaccacccactgtattcattttcaaggtaactagattttactttaatatgccgaaataaaaaatttttgtataatatctagaggtagaggtattgtttagataaatacaaataacatagatacatcgcatacttagcatttttataaatatacataagacatacactttatacatttttgtaaaaatactcataaaaaaatttataaaaattatggcacaaccatatcttgtataggtagtttagttcgtcgagtgaacctataaacagataatagacaacacataataatgcctactaatacaagcataataccgggagatgggatatatgacgttgtagtgtttgggttttctgaacgttgatagtctactaatactacatgctgacatctaatgcctgtataaccatgagagcatctacaatacataccgtcaatatctctagcgtggatacagtcaccgtgtaaacaatatccatctccctctggaccgcataatctgatagctggaatatctgttgtagcgtttgtaatttctggcaatgtcgtttcgatagcgttaccactatcggcgaatgatctgattatcatagcagcgaacaacaacatcagataatttatcaacatttttgatggattctgtgtttatgctgtttctcagtgtgtgtttatgacaagattgggaattttatattattaattcagtaatataaactaataatatattgttaattgtgtaaataatataaaaataacaatacaatattgaatgtgttgctgttaaaaatgtatgtgttaatataatagaataaaataaatgagtatgatcattttagataacgattgattttatcattaccgcttcattcttatattctttgcttacggaacctatatttagaaacatctactaacaattttttatgcttgcattattaatggtatgtaatatgattgattgtgtacgcaataccaatttgttaagtatgaatacggggtacaaacataaattgaaatttaacattatttatttatgatatatatcgttatcgttaggtctataccatggatatctttaaagaactaatcttaaaacaccctgatgaaaatgttttgatttctccagtttccattttatctactttatctattctaaatcatggagcagctggttctacagctgaacaactatcaaaatatatagagaatatgaatgagaatacacccgatgacaataatgatgacatggaggtagatattccgtattgtgcgacactagctaccgcaaataaaatatacggtagcgatagtatcgagttccacgcctccttcctacaaaaaataaaagacgattttcaaactgtaaactttaataatgctaaccaaacaaaggaactaatcaacgaatgggttaagacaatgacaaatggtaaaattaattccttattgactagtccgctatccattaatactcgtatgacagttgttagcgccgtccattttaaagcaatgtggaaatatccattttctaaacatcttacatatacagacaagttttatatttctaagaatatagttaccagcgttgatatgatggtgggtaccgagaataacttgcaatatgtacatattaatgaattattcggaggattctctattatcgatattccatacgagggaaactctagtatggtaattatactaccggacgacatagaaggtatatataacatagaaaaaaatataacagatgaaaaatttaaaaaatggtgtggtatgttatctactaaaagtatagacttgtatatgccaaagtttaaagtggaaatgacagaaccgtataatctggtaccgattttagaaaatttaggacttactaatatattcggatattatgcagattttagcaagatgtgtaatgaaactatcactgtagaaaaatttctacatacgacgtttatagatgttaatgaggagtatacagaagcatcggccgttacaggagtatttacgattaacttttcgatggtatatcgtacgaaggtctacataaaccatccattcatgtacatgattaaagacaccacaggacgtatactttttatagggaaatactgctatccgcaataaatataaacaaatagacttttataaagagtcttcaacgataagtatatcgacatactacttatgctgcgaaagattctgaacgagaacgactatctcaccctcttggatcatatccgcactgctaaatactaaatctccactacactttttatcatcttatgaggaatgattgccttcgtgaaataggaataattagcaccagaatagctatggattattgtggtagagagtgcactattctatgtcgtctactggatgaagatgtgacgtacaaaaaaataaaactagaaattgaaacgtgtcacaacttatcaaaacatatagatagacgaggaaacaatgcgctacattgttacgtctccaataaatgcgatacagacattaagattgttctctcgcggagtcgagagactttgtagaaacaacgaaggattaactccgctaggagtatacagtaagcatagatacgtaaaatctcagattgtgcatctactgatatccagctattcaaattcctctaacgaactcaagtcgaatataaatgatttcgatctgtattcggataatatcgacttacgtctgctaaaatacctaattgtggataaacggatacgtccgtccaagaatacgaattatgcaatcaatggtctcggattggtggatatatacgtaacgacgcctaatccgagaccagaagtattgctatggcttcttaaatcagaatgttacagcaccggttacgtatttcgtacctgtatgtacgacagtgatatgtgtaagaactctcttcattactatatatcgtctcatagagaatctcaatctctatccaaggatgtaattaaatgtttgatcgataacaatgtttccatccatggcagagacgaaggaggatctttacccatccaatactactggtctttctcaaccatagatatagagattgttaaattattattaataaaggatgtggacacgtgtagagtatacgacgtcagccctatattagaggcgtattatctaaacaagcgatttagagtaaccccatataatgtagacatggaaatcgttaatcttcttattgagagacgtcatactcttgtcgacgtaatgcgtagtattacttcgtacgattccagagaatataaccactacatcatcgataacattctaaagagatttagacaacaggatgaatccatcgtacaagccatactgataaactacttacattacggcgatatggtcgttcgatgcatgttagataacggacaacaactatcctctacacgactactttgttaataataatctcgtcgatgtaaacgtcgtaaggtttatcgtggaaaatatggacacgcggctgtaaatcacgtatcgaacaatggccgtctatgtatgtacggtctgatattatcgagatttaataattgcgggtatcactgttatgaaaccatactgatagatgtatttgatatactaagcaagtacatggatgatatagatatgatcgataactctactatattacgcggtcgatgtcaataatatacaatttgcaaagcggttattggaatatggagcgagtatcacgctcgataatcaatacggccatccagaaaagcagttacagaagagaaaacaaaacgaaatcgttgttctacaagatgtctctccctacgacgattactacgtaaaaaagatactagcctactgcctattaagggacgagtcattcgcggaactacatagtaaattctgtttaaacgaggactataaaagtgtatttatgaaaaatatatcattcgataagatagattccatcatcgtgacataagtcgcctcaaagagattcgaatctccgacaccgacctgtatacggtatcacagctatcttaaagccatacattcagacagtcacatttcatttcccatgtacgacgatctcatagaacagtgccatctatcgatggagcgtaaaagtaaactcgtcgacaaagcactcaataaattagagtctaccatcggtcaatctagactatcgtatttgcctccggaaattatgcgcaatatcatctaaacagtatgttgtacggaaagaaccattacaaatattatccatgatagaaagaaaatatctatatgattggagaagtaggaaacaggaacaagacaacgattactacattattaaatcatgaagtccgtattatactcgtatatattgtttctctcatgtataataataaacggaagagatatagcaccgcatgcaccatccgatggaaagtgtaaagacaacgaatacaaacgccataatttgtgtccgggaacatacgcttccagattatgcgatagcaagactaacacacgatgtacgccgtgtggttcgggtaccttcacatctcgcaataatcatttacccgcttgtctaagttgtaacggaagacgcgatcgtgtaacacgactcacaatagaatctgtgaatgctctcccggatattattgtcttctcaaaggatcatccggatgcaaggcatgtgtttcccaaacaaaatgtggaataggatacggagtatccggagacgtcatctgttctccgtgtggtctcggaacatattctcacaccgtctcttccgcagataaatgcgaacccgtacccagaaatacgtttaactatatcgatgtggaaattaacctgtatccagttaacgacacgtcgtgtactcggacgaccactaccggtctcagcgaatccatctcaacgtcggaactaactattactatgaatcataaagactgtaatcccgtatttcgtgatggatacttctccgttcttaataaggtagcgacttcaggtttctttacaggagaaaggtgtgcactctgaatttcgagattaaatgcaataacaaagattcttcctccaaacagttaacgaaagcaaagaatgatactatcatgccgcattcggagacagtaactctagtgggcgacatctatatactatatagtaataccaatactcaagactacgaaactgatacaatctcttatcatgtgggtaatgttctcgatgtcgatagccatatgcccggtagttgcgatatacataaactgatcactaattccaaacccacccactttttatagtaagtttttcacccataaataataaatacaataattaatttctcgtaaaagtagaaaatatattctaatttattgcacggtaaggaagtagaatcataaagaacagtactcaatcaatagcaattatgaaacaatatatcgtcctggcatgcatgtgcctggcggcagctgctatgcctgccagtcttcagcaatcatcctcatcctcctcctcgtgtacggaagaagaaaacaaacatcatatgggaatcgatgttattatcaaagtcacaaagcaagaccaaacaccgaccaatgataagatttgccaatccgtaacggaaattacagagtccgagtcagatccagatcccgaggtggaatcagaagatgattccacatcagtcgaggatgtagatcctcctaccacttattactccatcatcggtggaggtctgagaatgaactttggattcaccaaatgtcctcagattaaatccatctcagaatccgctgatggaaacacagtgaatgctagattgtccagcgtgtccccaggacaaggtaaggactctcccgcgatcactcatgaagaagctcttgctatgatcaaagactgtgaagtgtctatcgacatcagatgtagcgaagaagagaaagacagcgacatcaagacccatccagtactcgggtctaacatctctcataagaaagtgagttacgaagatatcatcggttcaacgatcgtcgatacaaaatgcgtcaagaatctagagtttagcgttcgtatcggagacatgtgcaaggaatcatctgaacttgaggtcaaggatggattcaagtatgtcgacggatcggcatctgaaggtgcaaccgatgatacttcactcatcgattcaacaaaactcaaagcgtgtgtctgaatcgataactctattcatctgaaattggatgagtagggttaatcgaacgattcaggcacaccacgaattaaaaaagtgtaccggacactatattccggtttgcaaaacaaaaatgttcttaactacattcacaaaaagttacctctcgcgacttcttctttttctgtctcaatagtgtgatacgattatgacactattcctattcctattcctatttcctttcagagtatcacaaaaatattaaacctctttctgatggtctcataaaaaaagttttacaaaaatatttttattctctttctctctttgatggtctcataaaaaaagttttacaaaaatatttttattctctttctctctttgatggtctcataaaaaaagttttacaaaaatatttttattctctttctctctttgatggtctcataaaaaaagttttacaaaaatatttttattctctttctctctttgatggtctcataaaaaaagttttacaaaaatatttttattctctttctctctttgatggtctcataaaaaaagttttacaaaaatatttttattctctttctctctttgatggtctcataaaaaaagttttacaaaaatatttttattctctttctctctttgatggtctcataaaaaaagttttacaaaaatatttttattctctttctctctttgatggtctcataaaaaaagttttacaaaaatatttttattctctttctctctttgatggtctcataaaaaaagttttacaaaaatatttttattctctttctctctttgatggtctcataaaaaaagttttacaaaaatatttttattctctttctctctttgatggtctcataaaaaaagttttacaaaaatatttttattctctttctctctttgatggtctcataaaaaagttttacaaaaatatttttattctctttctctctttgatggtctcataaaaaagttttacaaaaatatttttattctctttctctctttgatggtctcataaaaaaagttttacaaaaatatttttattctctttctctctttgatggtctcataa

SEQ ID NO: 216 - DNA, 194927 bp, Artificial Sequence
  GLV-1h462
ttatgagaccatcaaagagagaaagagaataaaaatatttttgtaaaactttttttatgagaccatcaaagagagaaagagaataaaaatatttttgtaaaacttttttatgagaccatcaaagagagaaagagaataaaaatatttttgtaaaacttttttatgagaccatcaaagagagaaagagaataaaaatatttttgtaaaactttttttatgagaccatcaaagagagaaagagaataaaaatatttttgtaaaactttttttatgagaccatcaaagagagaaagagaataaaaatatttttgtaaaactttttttatgagaccatcaaagagagaaagagaataaaaatatttttgtaaaactttttttatgagaccatcaaagagagaaagagaataaaaatatttttgtaaaactttttttatgagaccatcaaagagagaaagagaataaaaatatttttgtaaaactttttttatgagaccatcaaagagagaaagagaataaaaatatttttgtaaaactttttttatgagaccatcaaagagagaaagagaataaaaatatttttgtaaaactttttttatgagaccatcaaagagagaaagagaataaaaatatttttgtaaaactttttttatgagaccatcaaagagagaaagagaataaaaatatttttgtaaaactttttttatgagaccatcaaagagagaaagagaataaaaatatttttgtaaaactttttttatgagaccatcaaagagagaaagagaataaaaatatttttgtaaaactttttttatgagaccatcagaaagaggtttaatatttttgtgatactctgaaaggaaataggaataggaataggaatagtgtcataatcgtatcacactattgagacagaaaaagaagaagtcgcgagaggtaactttttgtgaatgtagttaagaacatttttgttttgcaaaccggaatatagtgtccggtacacttttttaattcgtggtgtgcctgaatcgttcgattaaccctactcatccaatttcagatgaatagagttatcgattcagacacacgctttgagttttgttgaatcgatgagtgaagtatcatcggttgcaccttcagatgccgatccgtcgacatacttgaatccatccttgacctcaagttcagatgattccttgcacatgtctccgatacgaacgctaaactctagattcttgacgcattttgtatcgacgatcgttgaaccgatgatatcttcgtaactcactttcttatgagagatgttagacccgagtactggatgggtcttgatgtcgctgtctttctcttcttcgctacatctgatgtcgatagacacttcacagtctttgatcatagcaagagcttcttcatgagtgatcgcgggagagtccttaccttgtcctggggacacgctggacaatctagcattcactgtgtttccatcagcggattctgagatggatttaatctgaggacatttggtgaatccaaagttcattctcagacctccaccgatgatggagtaataagtggtaggaggatctacatcctcgactgatgtggaatcatcttctgattccacctcgggatctggatctgactcggactctgtaatttccgttacggattggcaaatcttatcattggtcggtgtttggtcttgctttgtgactttgataataacatcgattcccatatgatgtttgttttcttcttccgtacacgaggaggaggatgaggatgattgctgaagactggcaggcatagcagctgccgccaggcacatgcatgccaggacgatatattgtttcataattgctattgattgagtactgttctttatgattctacttccttaccgtgcaataaattagaatatattttctacttttacgagaaattaattattgtatttattatttatgggtgaaaaacttactataaaaagtgggtgggtttggaattagtgatcagtttatgtatatcgcaactaccgggcatatggctatcgacatcgagaacattacccacatgataagagattgtatcagtttcgtagtcttgagtattggtattactatatagtatatagatgtcgcccactagagttactgtctccgaatgcggcatgatagtatcattctttgctttcgttaactgtttggaggaagaatctttgttattgcatttaatctcgaaattcagagtgcacacctttctcctgtaaagaaacctgaagtcgctaccttattaagaacggagaagtatccatcacgaaatacgggattacagtctttatgattcatagtaatagttagttccgacgttgagatggattcgctgagaccggtagtggtcgtccgagtacacgacgtgtcgttaactggatacaggttaatttccacatcgatatagttaaacgtatttctgggtacgggttcgcatttatctgcggaagagacggtgtgagaatatgttccgagaccacacggagaacagatgacgtctccggatactccgtatcctattccacattttgtttgggaaacacatgccttgcatccggatgatcctttgagaagacaataatatccgggagagcattcacagattctattgtgagtcgtgttacacgatcgcgtcttccgttacaacttagacaagcgggtaaatgattattgcgagatgtgaaggtacccgaaccacacggcgtacatcgtgtgttagtcttgctatcgcataatctggaagcgtatgttcccggacacaaattatggcgtttgtattcgttgtctttacactttccatcggatggtgcatgcggtgctatatctcttccgtttattattatacatgagagaaacaatatatacgagtataatacggacttcatgatttaataatgtagtaatcgttgtcttgttcctgtttcctacttctccaatcatatagatattttctttctatcatggataatatttgtaatggttctttccgtacaacatactgtttagatgatattgcgcataatttccggaggcaaatacgatagtctagattgaccgatggtagactctaatttattgagtgctttgtcgacgagtttacttttacgctccatcgatagatggcactgttctatgagatcgtcgtacatgggaaatgaaatgtgactgtctgaatgtatggctttaagatagctgtgataccgtatacaggtcggtgtcggagattcgaatctctttgaggcgacttatgtcacgatgatggaatctatcttatcgaatgatatatttttcataaatacacttttatagtcctcgtttaaacagaatttactatgtagttccgcgaatgactcgtcccttaataggcagtaggctagtatcttttttacgtagtaatcgtcgtagggagagacatcttgtagaacaacgatttcgttttgttttctcttctgtaactgcttttctggatggccgtattgattatcgagcgtgatactcgctccatattccaataaccgctttgcaaattgtatattattgacatcgaccgcgtaatatagtagagttatcgatcatatctatatcatccatgtacttgcttagtatatcaaatacatctatcagtatggtttcataacagtgatacccgcaattattaaatctcgataatatcagaccgtacatacatagacggccattgttcgatacgtgatttacagccgcgtgtccatattttccacgataaaccttacgacgtttacatcgacgagattattattaacaaagtagtcgtgtagaggatagttgttgtccgttatctaacatgcatcgaacgaccatatcgccgtaatgtaagtagtttatcagtatggcttgtacgatggattcatcctgttgtctaaatctctttagaatgttatcgatgatgtagtggttatattctctggaatcgtacgaagtaatactacgcattacgtcgacaagagtatgacgtctctcaataagaagattaacgatttccatgtctacattatatggggttactctaaatcgcttgtttagataatacgcctctaatatagggctgacgtcgtatactctacacgtgtccacatcctttattaataataatttaacaatctctatatctatggttgagaaagaccagtagtattggatgggtaaagatcctccttcgtctctgccatggatggaaacattgttatcgatcaaacatttaattacatccttggatagagattgagattctctatgagacgatatatagtaatgaagagagttcttacacatatcactgtcgtacatacaggtacgaaatacgtaaccggtgctgtaacattctgatttaagaagccatagcaatacttctggtctcggattaggcgtcgttacgtatatatccaccaatccgagaccattgattgcataattcgtattcttggacggacgtatccgtttatccacaattaggtattttagcagacgtaagtcgatattatccgaatacagatcgaaatcatttatattcgacttgagttcgttagaggaatttgaatagctggatatcagtagatgcacaatctgagattttacgtatctatgcttactgtatactcctagcggagttaatccttcgttgtttctacaaagtctctcgactccgcgagagaacaatcttaatgtctgtatcgcatttattggagacgtaacaatgtagcgcattgtttcctcgtctatctatatgttttgataagttgtgacacgtttcaatttctagttttatttttttgtacgtcacatcttcatccagtagacgacatagaatagtgcactctctaccacaataatccatagctattctggtgctaattattcctatttcacgaaggcaatcattcctcataagatgataaaaagtgtagtggagatttagtatttagcagtgcggatatgatccaagagggtgagatagtcgttctcgttcagaatctttcgcagcataagtagtatgtcgatatacttatcgttgaagactctttataaaagtctatttgtttatatttattgcggatagcagtatttccctataaaaagtatacgtcctgtggtgtctttaatcatgtacatgaatggatggtttatgtagaccttcgtacgatataccatcgaaaagttaatcgtaaatactcctgtaacggccgatgcttctgtatactcctcattaacatctataaacgtcgtatgtagaaatttttctacagtgatagtttcattacacatcttgctaaaatctgcataatatccgaatatattagtaagtcctaaattttctaaaatcggtaccagattatacggttctgtcatttccactttaaactttggcatatacaagtctatacttttagtagataacataccacaccattttttaaatttttcatctgttatatttttttctatgttatatataccttctatgtcgtccggtagtataattaccatactagagtttccctcgtatggaatatcgataatagagaatcctccgaataattcattaatatgtacatattgcaagttattctcggtacccaccatcatatcaacgctggtaactatattcttagaaatataaaacttgtctgtatatgtaagatgtttagaaaatggatatttccacattgctttaaaatggacggcgctaacaactgtcatacgagtattaatggatagcggactagtcaataaggaattaattttaccatttgtcattgtcttaacccattcgttgattagttcctttgtttggttagcattattaaagtttacagtttgaaaatcgtcttttattttttgtaggaaggaggcgtggaactcgatactatcgctaccgtatattttatttgcggtagctagtgtcgcacaatacggaatatctacctccatgtcatcattattgtcatcgggtgtattctcattcatattctctatatattttgatagttgttcagctgtagaaccagctgctccatgatttagaatagataaagtagataaaatggaaactggagaaatcaaaacattttcatcagggtgttttaagattagttctttaaagatatccatggtatagacctaacgataacgatatatatcataaataaataatgttaaatttcaatttatgtttgtaccccgtattcatacttaacaaattggtattgcgtacacaatcaatcatattacataccattaataatgcaagcataaaaaattgttagtagatgtttctaaatataggttccgtaagcaaagaatataagaatgaagcggtaatgataaaatcaatcgttatctaaaatgatcatactcatttattttattctattatattaacacatacatttttaacagcaacacattcaatattgtattgttatttttatattatttacacaattaacaatatattattagtttatattactgaattaataatataaaattcccaatcttgtcataaacacacactgagaaacagcataaacacagaatccatcaaaaatgttgataaattatctgatgttgttgttcgctgctatgataatcagatcattcgccgatagtggtaacgctatcgaaacgacattgccagaaattacaaacgctacaacagatattccagctatcagattatgcggtccagagggagatggatattgtttacacggtgactgtatccacgctagagatattgacggtatgtattgtagatgctctcatggttatacaggcattagatgtcagcatgtagtattagtagactatcaacgttcagaaaacccaaacactacaacgtcatatatcccatctcccggtattatgcttgtattagtaggcattattatgtgttgtctattatctgtttataggttcactcgacgaactaaactacctatacaagatatggttgtgccataatttttataaatttttttatgagtatttttacaaaaatgtataaagtgtatgtcttatgtatatttataaaaatgctaagtatgcgatgtatctatgttatttgtatttatctaaacaatacctctacctctagatattatacaaaaattttttatttcggcatattaaagtaaaatctagttaccttgaaaatgaatacagtgggtggttccgtatcaccagtaagaacataatagtcaaatacagtatccgattgagattttgcatacaatactagtctagaaagaaatttgtaatcatcttctgtgacgggagtccatatatctgtatcatcgtctagtttatcagtgtcccatgctatattcctgttatcatcattagttaatgaaaataactctcgtgcttcagaaaagtcaaatattgtatccatacatacatctccaaaactatcgcttatacgtttatctttaacgatacctatacctagatggttatttactaacagacattttccagatctattgactataactcctatagtttccacatcaaccaagtaatgatcatctattgttatataacaataacataactcttttccatttttatcagtatgtatatctatatcaacgtcgtcgttgtagtgaatagtagtcattgatctattatatgaaacggatatgtctagaacggcaattgttttacgtccagttaacactttcgttgatttaaagtctagagtctttgcaaacataatatccttatccgactttatatttcctgtagggtggtataattttattttgcctccacatatcggtgtttccaaatatattactagacaatattccatatagttattagttaagggtacccaattagaacacgtacgcttattatcatcatttggatcgtatttcataaaagttattgtgttatcgatgtcaacacattctacattttttaatcgtctatatagtatttttctgatattttctataatatcagaattgtcttccatcggaagttgtatactatcggaatcagttacatgtttaaataattctctgatgtcattccttatacaatcaaattcattattaaacagtttaatagtctgtagacctttatcgtcgtaaatatccattgtcttattagttacgcttatttttatgtgtttttacgttgctttattatattttataagaatgattgtttgacgaatcacgagaactattaagacacattattaggtatatattataaaaaagtttttgattacgatgttataagaggaaagaggacacattaacatcatacatcaattaactacattcttataacatcgtaatcaaaagaattgcaattttgatgtataacaactgtcaatgggttatggaattgtatattacatattatacggtatgttggtaacgacaaataccggtcggtaattgtctgccggtgtaatagaattatatatatctatctattacaccggccttgtatacataataataagttgtggtagtatgatctccatatttataatttaggactttgtattcagtatttttggaatcataaaaaataaaaaaaagttttactaatttaaaatttaaaaagtatttacatttttttcactgtttagtcgcggatatggaattcgatcctgccaaaatcaatacatcatctatagatcatgtaacaatattacaatacatagatgaaccaaatgatataagactaacagtatgcattatccgaaatattatatcaatatcacaaaaataaatacacatttggctaatcaatttcgggcttggaaaaaacgtatcgccggaagggactatatgactaacttatctagagatacaggaatacaacaatcaaaacttactgaaactatacgtaactgtcaaaaaaatagaaacatatatggtctatatatacactacaatttagttattaattggataaccgatgtgattatcaatcaatattaagagggttggtaaattggtacatagctaataatacctatactccaaatacacccaataatacaacaaccatttctgagttggatatcatcaaaatactaaataaatacgaggacgtgtatagagtaagtaaagaaaaagaatgtggaatttgctatgaagttgtttactcaaaacgatagatactttggtttattggattcgtgtactcatatattttgcataacatgcatcaatatatggcatagaacacgaagagaaaccggtgcgtcggataattgtcctatatgccgtacccgttttagaaacataacaatgagcaagttctataagctagttaactaataaataaaaagtttaatttgttgacgacgtatgtcgttattttttctcgtataaaagattaatttgattctaatataatctttagtattggataaatatcaattcaaattaattccattagattatatcataaataaaaatagtagcacacaactacttcagcaaacattctttttataaatgccatctagcgtagcgaggacacaagtgaacctataattatcaaatttattagtatcagtcacatgaaggactttacgtagagtgacgattccactatctgtggtacgaacggtttcatcttctttgatgccatcacccagatgttctataaacttggtatcctcgtccgatttcatatcctttgccaaccaatacatatagctaaactcaggcatatgttccacacatcctgaacaatgaaattctccagaagatgttacaatgtctagatttggacatttggtttcaaccgcgttaacatatgagtgaacacacccatacatgaaagcgatgagaaataggattctcatcttgccaaaatatcactagaaaaaatttatttatcagttttaaaggtataaaaaatacttattgttgctcgaatattttgtatttgatggtatacggaagattagaaatgtaggtattatcatcaactgattctatggttttatgtattctatcatgtttcactattgcgttggaaataatatcatatgcttccacatatattttattttgttttaactcataatactcacgtaattctggattattggcatatctatgaataattttagctccatgatcagtaaatattaatgagaacatagtattaccacctaccattatttttttcatctcattcaattcttaattgcaaagatctatataatcattatagcgttgacttatggactctggaatcttagacgatgtacagtcatctataatcatggcatatttaatacattgttttatagcatagtcgttatctacgatgttagatatttctctcaatgaatcaatcacacaatctaatgtaggtttatgacataatagcattttcagcagttcaatgtttttagattcgttgatggcaatggctatacatgtatatccgttatttgatctaatgttgacatctgaaccggattctagcagtaaagatactagagattgtttattatatctaacagccttgtgaagaagtgtttctcctcgtttgtcaatcatgttaatgtctttaagataaggtaggcaaatgtttatagtactaagaattgggcaagcataagacatgtcacaaagacccttttttgtatgtataagtgtaaaaattataacatccatagttggatttacataggtgtccaatcgggatctctccatcatcgagataattgatggcatctcccttccttttttagtagatatttcatcgtgtaagaatcaatattaatatttctaaagtatccgtgtatagcctctttatttaccacagctccatattccactagagggatatcgccgaatgtcatatactcaattagtatatgttggaggacatccgagttcattgttttcaatatcaaagagatggtttccttatcatttctccatagtggtacaatactacacattattccgtgcggctttccattttccaaaaacaatttgaccaaatctaaatctacatctttattgtatctataatcactatttagataatcagccataattcctcgagtgcaacatgttagatcgtctatatatgaataagcagtgttatctattcctttcattaacaatttaacgatgtctatatctatatgagatgacttaatataatattgaagagctgtacaatagtttttatctataaaagacggcttgattccgtgattaattagacatttaacaacttccggacgcacatatgctctcgtatccgactctgaatacagatgagagatgatatacagatgcaatacggtaccgcaatttcgtagttgataatcatcatacgcgtatcagtactcgtcctcataaagaacactgcagccattttctatgaacaaatcaataattttagaaacaggatcattgtcattacataattttctataactgaacgatggttttcacatttaacactcaagtcaaatccatgttctaccaacacctttatcaagtcaacgtctacatttttggatttcatatagctgaatatattaaagttatttatgttgctaaatccagtggcttctagtagagccatcgctatatccttattaactttaacatgtctactatttgtgtattcttctaatggggtaagctgtctccaatttttgcgtaatggattagtgccactgtctagtagtagtttgacgacctcgacattattacaatgctcattaaaaaggtatgcgtgtaaagcattattcttgaattggttcctggtatcattaggatctctgtctttcaacatctgtttaagttcatcaagagccacctcctcattttccaaatagtcaaacattttgactgaatgagctactgtgaactctatacacccacacaactaatgtcattaaatatcatgtcaaaaacttgtacaattattaataaaaataatttagtgtttaaattttaccagttccagattttacacctccgttaatacctccattaaccccactggacgatcctcctccccacattccaccgccaccagatgtataagttttagatcctttattactaccatcatgtccatggataaagacactccacatgccgccactaccccctttagaagacatattaataagacttaaggacaagtttaacaataaaattaatcacgagtaccctactaccaacctacactattatatgattatagtttctatttttacagtaccttgactaaagtttctagtcacaagagcaatactaccaacctacactattatatgattatagtttctatttttataggaacgcgtacgagaaaatcaaatgtctaatttctaacggtagtgttgataaacgattgttatccgcggatacctcctctatcatgtcgtctattttcttactttgttctattaacttattagcattatatattatttgattataaaacttatattgcttattagcccaatctgtaaatatcggattattaacatatcgtttctttgtaggtttatttaacatgtacatcactgtaagcatgtccttaccatttattttaatttgacgcatatccgcaatttctttttcgcagtcggttataaattctatatatgatggatacatgctacatgtgtacttataatcgactaatatgaagtacttgatacatattttcagtaacgatttattattaccacctatgaataagtacctgtgatcgtctaggtaatcaactgttttcttaatacattcgatggttggtaatttactcagaataatttccaatatcttaatatataattctgctatttctgggatatatttatctgccagtataacacaaatagtaatacatgtaaacccatattttgttattatattaatgtctgcgccattatctattaaccattctactaggctgacactatgcgactcaatacaatgataaagtatactacatccatgtttatctattttgtttatatcatcaatatacggcttacaaagttttagtatcgataacacatccaactcacgcatagagaaggtagggaataatggcataatatttattaggttatcatcattgtcattatctacaactaagtttccattttttaaaatatactcgacaactttaggatctctattgccaaatttttgaaaatatttatttatatgcttaaatctatataatgtagctccttcatcaatcatacatttaataacattgatgtatactgtatgataagatacatattctaacaatagatcttgtatagaatctgtatatcttttaagaattgtggatattaggatattattacataaactattacacaattctaaaatataaaacgtatcacggtcgaataatagttgatcaactatataattatcgattttgtgatttttcttcctaaactgtttacgtaaatagttagatagaatattcattagttcatgaccactatagttactatcgaataacgcgtcaaatatttcccgtttaatatcgcatttgtcaagataataatagagtgtggtatgttcacgataagtataataacgcatctctttttcgtgtgaaattaaatagtttattacgtccaaagatgtagcataaccatcttgtgacctagtaataatataataatagagaactgttttacccattctatcatcataatcagtggtgtagtcgtaatcgtaatcgtctaattcatcatcccaattataatattcaccagcacgtctaatctgttctattttgatcttgtatccatactgtatgttgctacatgtaggtattcctttatccaataatagtttaaacacatctacattgggatttgatgttgtagcgtatttttctacaatattaataccatttttgatactatttatttctatacctttcgaaattagtaatttcaataagtctatattgatgttatcagaacatagatattcgaatatatcaaaatcattgatatttttatagtcgactgacgacaataacaaaatcacaacatcgtttttgatattattatttttcttggtaacgtatgcctttaatggagtttcaccatcatactcatataatggatttgcaccactttctatcaatgattgtgcactgctggcatcgatgttaaatgttttacaactatcatagagtatcttatcgttaaccatgattggttgttgatgctatcgcattttttggtttctttcatttcagttatgtatggatttagcacgtttgggaagcatgagctcatatgatttcagtactgtagtgtcagtactattagtttcaataagatcaatctctagatctatagaatcaaaacacgataggtcagaagataatgaatatctgtaggcttcttgttgtactgtaacttctggttttgttagatggttgcatcgtgctttaacgtcaatggtacaaattttatcctcgctttgtgtatcatattcgtccctactataaaattgtatattcagattatcatgcgatgtgtatacgctaacggtatcaataaacggagcacaccatttagtcataaccgtaatccaaaaatttttaaagtatatcttaacgaaagaagttgtgtcattgtctacggtgtatggtactagatcctcataagtgtatatatctagagtaatgtttaatttattaaatggttgataatatggatcctcgtgacaatttccgaagatggaaataagacataaacacgcaataaatctaattgcggacatggttactccttaaaaaaatacgaataatcaccttggctatttagtaagtgtcatttaacactatactcatattaatccatggactcataatctctatacgggattaacggatgttctatatacggggatgagtagttctcttctttaactttatactttttactaatcatatttagactgatgtatgggtaatagtgtttgaagagctcgttctcatcatcagaataaatcaatatctctgtttttttgttatacagatgtattacagcctcatatattacgtaatagaacgtgtcatctaccttattaactttcaccgcatagttgtttgcaaatacggttaatcctttgacctcgtcgatttccgaccaatctgggcgtataatgaatctaaactttaattgcttgtaatcattcgaaataatttttagtttgcatccgtagttatcccctttatgtaactgtaaatttctcaacgcgatatctccattaataatgatgtcgaattcgtgctgtatacccatactgaatggatgaacgaataccgacggcgttaatagtaatttactttttcatctttacatattgggtactagttttactatcataagtttataaattccacaagctactatggaataagccaaccatcttagtataccacacatgtcttaaagtttattaattaattacatgttgttttatatatatcgctacgaatttaaagagaaattagtttaggaagaaaaattatctatctacatcatcacgtctctgtattctacgatagagtgctactttaagatgcgacagatccgtgtcatcaaatatatactccattaaaatgattattccggcagcgaacttgatattggatatatcacaacctttgttaatatctacgacaatagacagcagtcccatggttccataaacagtgagtttatctttctttgaagagatattttgtagagatcttataaaactgtcgaatgacatcgcatttatatctttagctaaatcgtatatgttaccatcgtaatatctaaccgcgtctatcttaaacgtttccatcgctttaaagacgtttccgatagatggtctcatttcatcagtcatactgagccaacaaatataatcgtgtataacatctttgatagaatcagactctaaagaaaacgaatcggctttattatacgcattcatgataaacttaatgaaaaatgtttttcgttgtttaagttggatgaatagtatgtcttaataattgttattatttcattaattaatatttagtaacgagtacactctataaaaacgagaatgacataactaatcataactagttatcaaagtgtctaggacgcgtaattttcatatggtatagatcctgtaagcattgtctgtattctggagctattttctctatcgcattagtgagttcagaatatgttataaatttaaatcgaataacgaacataactttagtaaagtcgtctatattaactcttttattttctagccatcgtaataccatgtttaagatagtatattctctagttactacgatctcatcgttgtctagaatatcacatactgaatctacatccaattttagaaattggtctgtgttacatatctcttctatattattgttgatgtattgtcgtagaaaactattacgtagaccattttctttataaaacgaatatatagtactccaattatctttaccgatatatttgcacacataatccattctctcaatcactacatctttaagattttcgttgttaagatatttggctaaactatataattctattagatcatcaacagaatcagtatatatttttctagatccaaagacgaactctttggcgtcctctataatattcccagaaaagatattttcgtgttttagtttatcgagatctgatctgttcatatacgccatgattgtacggtacgttatgataaccgcataaaataaaaatccattttcatttttaaccaatactattcataattgagattgatgtaatactttgttactttgaacgtaaagacagtacacggatccgtatctccaacaagcacgtagtaatcaaatttggtgttgttaaacttcgcaatattcatcaatttagatagaaacttatactcatcatctgttttaggaatccatgtattattaccactttccaacttatcattatcccaggctatgtttcgtccatcatcgttgcgcagagtgaataattcttttgtattcggtagttcaaatatatgatccatgcatagatcggcaaagctattgtagatgtgatttttcctaaatctaatataaaactcgtttactagcaaacactttcctgatttatcgaccaagacacatatggtttctaaatctatcaagtggtggggatccatagttatgacgcagtaacatatattattacattcttgactgtcgctaatatctaaatatttattgttatcgtattggattctgcatatagatggcttgtatgtcaaagatatagaacacataaccaatttatagtcgcgctttacattctcgaatctaaagttaagagatttagaaaacattatatcctcggatgatgttatcactgtttctggagtaggatatattaaagtctttacagatttcgtccgattcaaataaatcactaaataatatcccacattatcatctgttagagtagtatcattaaatctattatattttatgaaagatatatcactgctcacctctatatttcgtacatttttaaactgtttgtataatatctctctgatacaatcagatatatctattgtgtcggtagacgataccgttacatttgaattaatggtgttccattttacaacttttaacaagttgaccaattcatttctaatagtatcaaactctccatgattaaatattttaatagtatccattttatatcactacggacacaaagtagctgacataaaccattgtataatttttatgttttatgtttattagcgtacacattttggaagttccggcttccatgtatttcctggagagcaagtagatgatgaggaaccagatagtttatatccgtacttgcacttaaagtctacattgtcgttgtatgagtatgatcttttaaacccgctagacaagtatccgtttgatattgtaggatgtggacatttaacaatctgacacgtgggtggatcggaccattctcctcctgaacacaggacactagagttaccaatcaacgaatatccactattgcaactataagttacaacgctcccatcggtataaaaatcctcgtatccgttatgtcttccgttggatatagatggaggggattggcatttaacagattcacaaataggtgcctcgggattccataccatagatccagtagatcctaattcacaatacgatttagattcaccgatcaactgatatccgctattacaagagtacgttatactagagccaaagtctactccaccaatatcaagttggccattatcgatatctcgaggcgatgggcatctccgtttaatacattgattaaagagtgtccatccagtacctgtacatttagcatatataggtcccattttttgctttctgtatccaggtagacatagatattctatagtgtctcctatgttgtaattagcattagcatcagtctccacactattcttaaatttcatattaatgggtcgtgacggaatagtacagcatgatagaacgcatcctattcccaacaatgtcaggaacgtcacgctctccaccttcatatttatttatccgtaaaaatgttatcctggacatcgtacaaataataaaaagcccatatatgttcgctattgtagaaattgtttttcacagttgctcaaaaacgatggcagtgacttatgagttacgttacactttggagtctcatctttagtaaacatatcataatattcgatattacgagttgacatatcgaacaaattccaagtatttgattttggataatattcgtattttgcatctgctataattaagatataatcaccgcaagaacacacgaacatctttcctacatggttaaagtacatgtacaattctatccatttgtcttccttaactatatatttgtatagataattacgagtctcgtgagtaattccagtaattacatagatgtcgccgtcgtactctacagcataaactatactatgatgtctaggcatgggagacttttttatccaacgatttttagtgaaacattccacatcgtttaatactacatatttctcatacgtggtataaactccacccattacatatatatcatcgtttacgaataccgacgcgcctgaatatctaggagtaattaagtttggaagtcttatccatttcgaagtgccgtgtttcaaatattctgccacacccgttgaaatagaaaattctaatcctcctattacatataactttccatcgttaacacaagtactaacttctgattttaacgacgacatattagtaaccgttttccattttttcgttttaagatctacccgcgatacggaataaacatgtctattgttaatcatgccgccaataatgtatagacaattatgtaaaacatttgcattatagaattgtctatctgtattaccgactatcgtccaatattctgttctaggagagtaatgggttattgtggatatataatcagagtttttaatgactactatattatgttttataccatttcgtgtcactggctttgtagatttggatatagttaatcccaacaatgatatagcattgcgcatagtattagtcataaacttgggatgtaaaatgttgatgatatctacatcgtttggatttttatgtatccactttaataatatcatagctgtaacatcctcatgatttacgttaacgtcttcgtgggataagatagttgtcagttcatcctttgataattttccaaattctggatcggatgtcaccgcagtaatattgttgattatttctgacatcgacgcattatatagttttttaattccatatcttttagaaaagttaaacatccttatacaatttgtgaaattaatattatgaatcatagtttttacacatagatctactacaggcggaacatcaattattatggcagcaactagtatcatttctacattgtttatggtgatgtttatcttcttccagcgcatatagtctaatagcgattcaaacgcgtgatagtttataccattcaatataatcgcttcatcctttagatggtgatcctgaatgcgtttaaaaaaattatacggagacgccgtaataatttccttattcacttgtataatttccccattgatagaaaatattacgctttccattcttaaagtactataagtaattatagtataatgtaaacgtttatatattcaatatttttataaaaatcattttgacattaattcctttttaaatttccgtctatcatctatagaaacgtattctatgaatttataaaatgcttttacgtgtcctatcgtaggcgatagaaccgctaaaaagcctatcgaatttctacaaaagaatctgttatatggtatagggagagtataaaacattaaatgtccgtacttattaaagtattcagtagccaatcctaactctttcgaatacttattaatggctcttgttctgtacgaatctatttttttgaacaacggacctagtggtatatcttgttctatgtatctaaaataatgtctgactagatccgttagtttaatatccgcagtcatcttgtctagaatggcaaatctaactgcgggtttaggctttagtttagtttctatatctacatctatgtctttatctaacaccaaaaatataatagctaatattttattacaatcatccggatattcttctacgatctcactaactaatgtttctttggttatactagtatagtcactatcggacaaataaagaaaatcagatgatcgatgaataatacatttaaattcatcatctgtaagatttttgagatgtctcattagaatattattagggttagtactcattatcattcggcagctattacttattttattatttttcaccatatagatcaatcattagatcatcaaaatatgtttcaatcatcctaaagagtatggtgaatgactcttcccatctaatttctgaacgttcaccaatgtctctagccactttggcactaatagcgatcattcgcttagcgtcttctatattattaactggttgatttaatctatctagcaatggaccgtcggacagcgtcattctcatgttcttaatcaatgtacatacatcgccgtcatctaccaattcatccaacaacataagctttttaaaatcatcattataataggtttgatcgttgtcatttctccaaagaatatatctaataagtagagtcctcatgcttagttaacaactattttttatgttaaatcaattagtacaccgctatgtttaatacttattcatattttagtttttaggattgagaatcaatacaaaaattaatgcatcattaattttagaaatacttagtttccacgtagtcaatgaaacatttgaactcatcgtacaggacgttctcgtacaggacgtaactataaaccggtttatatttgttcaagatagatacaaatccgataactttttttacgaattctacgggatccactttaaaagtgtcataccgggttctttttatttttttaaacagatcaatggtgtgatgttgattaggtcttttacgaatttgatatagaatagcgtttacatattctccataatggtcaatcgccatttgttcgtatgtcataaattctttaattatatgacactgtgtattatttagttcatccttgttcattgttaggaatctatccaaaatggcaattatactagaactataggtgcgttgtatacacatattgatgtgtctgtttatacaatccatgatatttggatccatgctactaccttcgggtaaaattgtagcatcatataccatttctagtactttaggttcattattatccattgcagaggacgtcatgatcgaatcataaaaaaatatattatttttatgttattttgttaaaaataatcatcgaatacttcgtaagatactccttcatgaacataatcagttacaaaacgtttatatgaagtaaagtatctacgatttttacaaaagtccggatgcataagtacaaagtacgcgataaacggaataataatagatttatctagtctatctttttctatagctttcatagttagatacatggtctcagaagtaggattatgtaacatcagcttcgataaaatgactgggttatttagtcttacacattcgctcatacatgtatgaccgttaactacagagtctacactaaaatgattgaacaatagatagtctaccattgtttcgtattcagatagtacagcgtagtacatggcatcttcacaaattatatcattgtctaatagatatttgacgcatcttatggatcccacttcaacagccatcttaaaatcatattgctttcctttatcattaataatttctagaacatcatctctatcataaaagatacaaatattaactgtttgatccgtaataacattgctagtcaatagcaatttgttaataagatgcgctgggctcaatgtcttaataagaagtgtaagaggactatctccgaatttgttttgtttattaacatccgttgatggaagtaaaagatctataatgtctacattcttgactgttttagagcatacaatatggagaggtgtatttccatcatgatctggttttgagggactaattcctagtttcatcatccatgagattgtagaagcttttggattgtctgacataagatgtctatgaatatgatttttgccaaatttatccactatcctggcttcgaatccgatggacattatttttttaaacactctttctgaaggatctgtacacgccaacaacggaccacatccttcttcatcaaccgagttgttaatcttggctccatactgtaccaataaatttattctctctatgacttcatcatctgttcccgagagataatatagaggtgttttatgctgtttatcacacgcgtttggatctgcgccgtgcgtcagcagcatcgcgactattctattattattaattttagaagctatatgcaatggataatttccatcatcatccgtctcatttggagagtatcctctatgaagaagttcttcgacaaatcgttcatctagtcctttaattccacaatacgcatgtagaatgtgataattatttccagaaggttcgatagcttgtagcatattcctaaatacatctaaatttttactattatatttggcataaagagatagataatactcggccgacataatgttgtccattgtagtataaaaattaatatttctatttctatttctgtatatttgcaacaatttactctctataacaaatatcataacttagtttttttatgtcaagaaggcactggtttagttcatctataaatgtcacgccataactaccacgcatgccatactcagaattatgataaagatatttatccttggggtgtaggtaatggggattaatctttgttggatcagtctctaagttaacacatgtcacacatgatccatttatagttatatcacacgatgatgatttatgaattgattccggaagatcgctatcgtattttgtggttccacaattcatttccatacatgttattgtcacactaatattatgatgaactttatctagccgctgagtggtaaacaacagaacagatagtttattatctttaccaacaccctcagccgctgccacaaatctctgatccgtatccatgatggtcatgtttatttctagtccgtatccagtcaacactatgttagcatttctgtcgatatagctttcactcatatgacactcaccaataatagtagaattaatgtcgtaatttacaccaatagtgagttcggcggcaaagtaccaataccggtaatcttgtcgaggaggacatatagtattcttgtattctaccgaatacccgagagatgcgatacaaaagagcaagactaatttgtaaaccatcttactcaaaatatgtaacaatagtacgatgcaatgagtaagacaataggaaatctatcttatatacacataattattctatcaattttaccaattagttagtgtaatgttaacaaaaatgtgggagaatctaattagtttttctttacacaattgacgtacatgagtctgagttccttgtttttgctaattatttcatccaatttattattcttgacgatatcgagatcttttgtataggagtcaaacttgtattcaacatgcttttctataatcattttagctatttcggcatcatccaatagtacattttccagattagcagaatagatattaatgtcgtatttgaacagagcctgtaacatctcaatgtctttattatctatagccaatttaatgtccggaatgaagagaagggaattattggtgtttgtcgacgtcatatagtcgagcaagagaatcatcatatccacgtgtccattttttatagtgatgtgaatacaactaaggagaatagccagatcaaaagtagatggtatctctgaaagaaagtaggaaacaatacttacatcattaagcatgacggcatgataaaatgaagttttccatccagttttcccatagaacatcagtctccaatttttcttaacaaacagttttaccgtttgcatgttaccactatcaaccgcataatacaatgcggtgtttcccttgtcatcaaattgtgaatcatccagtccactgaatagcaaaatctttactattttggtatcttccaatgtggctgcctgatgtaatggaaattcattctctagaagatttttcaatgctccagcgttcaacaacgtacatactagacgcacgttattatcagctattgcataatacaaggcactatgtccatggacatccgccttaaatgtatctttactagagagaaagcttttcagctgcttagacttccaagtattaattcgtgacagatccatgtctgaaacgagacgctaattagtgtatattttttcattttttataattttgtcatattgcaccagaattaataatatctttaatagatctgattagtagatacatggctatcgcaaaacaacatatacacatttaataaaaataatatttattaagaaaattcagatttcacgtacccatcaatataaataaaataatgattccttacaccgtacccatattaaggagattccaccttacccataaacaatataaatccagtaatatcatgtctgatgatgaacacaaatggtgtattaaattccagtttttcaggagatgatctcgccgtagctaccataatagtagatgcctctgctacagttccttgttcgtcgacatctatctttgcattctgaaacattttataaatatataatgggtccctagtcatatgtttaaacgacgcattatctggattaaacatactaggagccatcatttcggctatcgacttaatatccctcttattttcgatagaaaatttagggagtttaagattgtacactttattccctaattgagacgaccaatagtctaattttgcagccgtgatagaatctgtgaaatgggtcatattatcacctattgccaggtacatactaatattagcatccttatacggaaggcgtaccatgtcatattctttgtcatcgattgtgattgtatttccttgcaatttagtaactacgttcatcatgggaaccgttttcgtaccgtacttattagtaaaactagcattgcgtgttttagtgatatcaaacggatattgccatatacctttaaaatatatagtattaatgattgcccatagagtattattgtcgagcatattagaatctactacattagacataccggatctacgttctactatagaattaattttattaaccgcatctcgtctaaagtttaatctatataggccgaatctatgatattgttgataatacgacggtttaatgcacacagtattatctacgaaactttgataagttagatcagtgtacgtatatttagatgttttcagcttagctaatcctgatattaattctgtaaatgctggacccagatctctttttctcaaatccatagtcttcaataattctattctagtattacctgatgcaggcaatagcgacataaacatagaaaacgaataaccaaacggtgagaagacaatattatcatcttgaatatttttatacgctactataccggcattggtaaatccttgtagacgataggcggacgctgaacacgctaacgatagtatcaataacgcaatcatgattttatggtattaataattaaccttatttttatgttcggtataaaaaaattattgatgtctacacatccttttgtaattgacatctatatatccttttgtataatcaactctaatcactttaacttttacagttttccctaccagtttatccctatattcaacatatctatccatatgcatcttaacactctctgccaagatagcttcagagtgaggatagtcaaaaagataaatatatagagcataatcattctcgtatactctgccctttattacatcacccgcattgggcaacgaataacaaaatgcaagcatcttgttaacgggctcgtaaattgggataaaaattatgtttttattgtcttatatctattttattcaagagaatattcaggaatttctttttccggttgtatctcgtcgcagtatatatcatttgtacattgtttcatattttttaatagtttacaccttttagtaggactagtatcgtacaattcatagctgtattttgaattccaatcacgcataaaaatatcttccaattgttgacgaagacctaatccatcatccggtgtaatattaatagatgctccacatgtatccgtaaagtaatttcctgtccaatttgaggtacctatataggccgttttatcggttaccatatatttggcatggtttaccctagaatacggaatgggaggatcagcatctggtacaataaatagctttacttctatatttatgtttttagattttagcatagcgatagatcttaaaaagtttctcatgataaacgaagatcgttgccagcaactaatcaatagcttaacggatacttgtctgtctatagcggatcttcttaattcatcttctatataaggccaaaacaaaattttacccgccttcgaataaataatagggataaagttcataacagatacataaacgaatttactcgcatttctaatacatgacaataaagcggttaaatcattggttctttccatagtacatagttgttgcggtgcagaagcaataaatacagagtgtggaacgccgcttacgttaatactaagaggatgatctgtattataatacgacggataaaagtttttccaattatatggtagattgttaactccaagataccagtatacctcaaaaatttgagtgagatccgctgccaagttcctattattgaagatcgcaatacccaattccttgacctgagttagtgatctccaatccatgttagcgcttcctaaataaatatgtgtattatcagatatccaaaattttgtatgaagaactcctcctaggatatttgtaatatctatgtatcgtacttcaactccggccatttgtagtctttcaacatcctttaatggtttgttagatttattaacggctactctaactcgtactcctcttttgggtaattgtacaatctcgtttaatattatcgtgccgaaattcgtacccacttcatccgataaactccaataaaaagatgatatatctagtgtttttgtggtattggatagaatttccctccacatgttaaatgtagacaaatatactttatcaaattgcatacctataggaatagtttctgtaatcactgcgattgtattatccggattcattttatttgttaaaagaataatcctatatcacttcactctattaaaaatccaagtttctatttctttcatgactgattttttaacttcatccgtttccttatgaagatgatgtttggcaccttcataaatttttatttctctattacaatttgcatgttgcatgaaataatatgcacctaaaacatcgctaatcttattgtttgttccctggagtatgagagtcggggggtgttaatcttggaaattatttttctaaccttgttggtagccttcaagacctgactagcaaatccagccttaattttttcatgattgactaatgggtcgtattggtatttataaactttatccatatctctagatactgattctggacatagctttccgactggcgcatttggtgtgatggttcccataagtttggcagctagcagattcagtcttgaaacagcatctgcattaactagaggagacattagaatcattgctgtaaacaagtttggattatcgtaagaggctagctcccatggaatgacccaataagtagatttaatagttaccacgtgctgtaccaaagtcatcaatcatcattttttcaccattacttcttccatgtccaatatgatcatgtgagaatactaaaattcctaacgatgatatgttttcagctagttcgtcataacgtccagaatgtttaccagctccatgacttatgaatactaatgccttaggatatgtaataggtttccaatatttacaatatatgtaatcattgtccagattgaacatacagtttgcactcatgattcacgttatataactatcaatattaacagttcgtttgatgatcatattatttttatgttttattgataattgtaaaaacatacaattaaatcaatatagaggaaggagacggctactgtcttttgtaagatagtcatggcgactaaattagattatgaggatgctgttttttactttgtggatgatgataaaatatgtagtcgcgactccatcatcgatctaatagatgaatatattacgtggagaaatcatgttatagtgtttaacaaagatattaccagttgtggaagactgtacaaggaattgatgaagttcgatgatgtcgctatacggtactatggtattgataaaattaatgagattgtcgaagctatgagcgaaggagaccactacatcaattttacaaaagtccatgatcaggaaagtttattcgctaccataggaatatgtgctaaaatcactgaacattggggatacaaaaagatttcagaatctagattccaatcattgggaaacattacagatttgatgaccgacgataatataaacatcttgatactttttctagaaaaaaaattgaattgatgatataggggtcttcataacgcataattattacgttagcattctatatccgtgttaaaaaaaattatcctatcatgtatttgagagttttatatgtagcaaacatgatagctgtgatgccaataagctttagatattcacgcgtgctagtgttagggatggtattatctggtggtgaaatgtccgttatataatctacaaaacaatcatcgcatatagtatgcgatagtagagtaaacatttttatagtttttactggattcatacatcgtctacccaattcggttataaatgaaattgtcgccaatcttacacccaaccccttgttatccattagcatagtattaacttcgttatttatgtcataaactgtaaatgattttgtagatgccatatcatacatgatattcatgtccctattataatcattactaactttatcacaatatatgttgataatatctatatatgatctagtctttgtgggcaactgtctatacaagtcgtctaaacgttgtttactcatatagtatcgaacagccatcattacatggtcccgttccgttgatagataatcgagtatgttagtggacttgtcaaatctatataccatattttctggaagtggatatacatagtcgtgatcaacattattgctagcctcatcttctatatcctgtactataccattatctatatcatctacataatctatgatattattacacataaacatcgacaacatactattgtttattatctaagtcctgttgatccaaacccttgatctcctctatttgtactatctagagattgtacttcttccagttctggataatatatacgttgatagattagctgagctattctatctccagtatttacattaaacgtacattttccattattaataagaatgactcctatgtttcccctataatcttcgtctattacaccacctcctatatcaatgccttttagtgacagaccagacctaggagctattctaccatagcagaacttaggcatggacatactaatatctgtcttaattaactgtctttctcctggagggatagtataatcgtaagcgctatacaaatcatatccggcagcacccggcgattgcctagtaggagatttagctctgttagtttccttaacaaatctaactggtgagttaatattcatgttgaacataaaactaatattttatttcaaaattatttaccatcccatatattccatgaataagtgtgatgattgtacacttctatagtatctatatacgatccacgataaaatcctcctatcaatagcagtttattatccactatgatcaattctggattatccctcggataaataggatcatctatcagagtccatgtattgctggattcacaataaaattccgcatttctaccaaccaagaataaccttctaccgaacactaacgcgcatgatttataatgaggataataagtggatggtccaaactgccactgatcatgattgggtagcaaatattctgtagttgtatcagtttcagaatgtcctcccattacgtatataacattgtttatggatgccactgctggattacatctaggtttcagaagactcggcatattaacccaagcagcatccccgtggaaccaacgctcaacagatgtgggatttggtagacctcctactacgtataatttattgttagcgggtatcccgctagcatacagtctggggctattcatcggaggaattggaatccaattgtttgatatataatttacagctatagcattgttatgtatttcattgttcatccatccaccgatgagatatactacttctccaacatgagtacttgtacacatatggaatatatctataatttgatccatgttcataggatactctatgaatggatacttgtatgatttgcgtggttgtttatcacaatgaaatattttggtacagtctagtatccattttacattatttatacctctgggagaaagataatttgacctgattacatttttgataaggagtagcagatttcctaatttatttcttcgcctcatataccacttaatgacaaaatcaactacataatcctcatctggaacatttagttcatcgctttctagaataagtttcatagatagataatcaaaattgtctatgatgtcatcttccagttccaaaaagtgtttggcaataaagtttttagtatgacataagagattggatagtccgtattctatacccatcatgtaacactcgacacaatattcctttctaaaatctcgtaagataaagtttatacaagtgtagatgataaattctacagaggttaatatagaagcacgtaataaattgacgacgttatgactatctatatatacctttccagtatatgagtaaataactatagaagttaaactgtgaatgtcaaggtctagacaaacccttgtaactggatctttatttttcgtgtatttttgacgtaaatgtgtgcgaaagtaaggagataactttttcaatatcgtagaattgactattatattgcctcctatggcatcaataattgttttgaatttcttagtcatagacaatgctaatatattcttacagtacacagtattgacaaatatcggcatttatgtttctttaaaagtcaacatctagagaaaaatgattatctttttgagacataactcccattttttggtattcacccacacgtttttcgaaaaaattagtttttccttccaatgatatattttccatgaaatcaaacggattggtaacattataaatttttttaaatcccaattcagaaatcaatctatccgcgacgaattctatatatgttttcatcatttcacaattcattcctataagtttaactggaagagccgcagtaagaaattcttgttcaatggatactgcatctgttataatagatctaacggtttcttcactcggtggatgcaataaatgtttaaacatcaaacatgcgaaatcgcagtgcagaccctcgtctctactaattagttcgttggaaaacgtgagtccgggcattaggccacgctttttaagccaaaatatggaagcgaatgatccagaaaagaaaattccttctactgcagcaaaggcaataagtctctctccataaccggcgctgtcatgtatccacttttgagcccaatcggccttcttttttacacaaggcatcgtttctatggcattaaagagatagtttttttcattactatctttaacataagtatcgatcaaaagactatacatttccgaatgaatgttttcaatggccatctgaaatccgtagaaacatctagcctcggtaatctgtacttctgtacaaaatcgttccgccaaattttcattcactattccgtcactggctgcaaaaaacgccaatacatgttttataaaatatttttcgtctggtgttagtttattccaatcattgatatctttagatatatctacttcttccactgtccaaaatgatgcctctgcctttttatacatgttccagatgtcatgatattggattgggaaaataacaaatctatttggatttggtgcaaggatgggttccataactaaattaacaataacaataaattttttttcagttatctatatgcctgtacttggattttttgtacatcgatatcgccgcaatcactacaataattacaagtattattgatagcattgttattagtactatcataattaaattatctacattcatgggtgctgaataatcgttattatcatcattatcattttgtaattgtgacatcatactagataaatcgtttgcgagattgttgtgggaagcgggcatggaggatgcattatcattattatttaacgccttccatttggattcacaaatgttacgcacattcaacattttatggaaactataattttgtgaaaacaaataacaagaaaactcgtcatcgttcaaatttttaacgatagtaaaccgattaaacgtcgagctaatttctaacgctagcgactctgttggatatgggtttccagatatatatcttttcagttcccctacgtatctataatcatctgtaggaaatggaagatatttccatttatctactgttcctaatatcatatgtggtggtgtagtagaaccattaagcgcgaaagatgttatttcgcatcgtattttaacttcgcaataatttctggttagataacgcactctaccagtcaagtcaatgatattagcctttacagatatattcatagtagtcgtaacgatgactccatcttttagatgcgatactcctttgtatgtaccagaatcttcgtacctcaaactcgatatatttaaacaagttaatgagatattaacgcgttttatgaatgatgatatataaccagaagttttatcctcggtggctagcgctataaccttatcattataataccaactagtgtgattaatatgtgacacgtcagtgtgggtacaaatatgtacattatcgtctacgtcgtattcgatacatccgcatacagccaacaaatataaaatgacaaatactctaacgccgttcgtacccatcttgatgcggtttaataaatgttttgatttcaatttattgtaaaaaaagattcggttttatactgttcgatattctcattgcttatattttcatctatcatctccacacagtcaaatccgtggttagcatgcacctcatcaaccggtaaaagactatcggactcttctatcattataactctagaatatttaatttggtcattattaatcaagtcaattatcttatttttaacaaacgtgagtattttactcattttttataaaaacttttagaaatatacagactctatcgtgtgtctatatcttctttttatatccaatgtatttatgtctgatttttcttcatttatcatatataatggtccaaattctacacgtgcttcggattcatccagatcattaaggttcttataattgtaacatccttctcttccctcttctacatcttccttcttattcttattcttagcgtcacagaatctaccacagcaggatcccatgacgagcgtcatattaaactaatccattttcaattataatatatgattagtaatgaccattaaaataaaaaatattcttcataaccggcaagaaagtgaaaagttcacattgaaactatgtcagtagtatacatcatgaaatgatgatatatatatactctattttggtggaggattatatgatataattcgtggataatcatttttaagacacatttctttattcgtaaatcttttcacgttaaatgagtgtccatattttgcaatttcttcatatgatggcggtgtacgtggacgaggctgctcctgttcttgttgtggtcgccgactgtcgtgtctgcgtttagatccctccattatcgcgattgcgtagatggagtactattttataccttgtaattaaatttttttattaattaaacgtataaaaacgttccgtatctgtatttaagagccagatttcgtctaatagaacaaatagctacagtaaaaataactagaataattgctacacccactagaaaccacggatcgtaatacggcaatcggttttcgataataggtggaacgtatattttatttaaggacttaacaattgtctgtaaaccacaatttgcttccgcggatcctgtattaactatctgtaaaagcatatgttgaccgggcggagccgaacattctccgatatctaatttctgtatatctataatattattaacctccgcatacgcattacagttcttttctagcttggataccgcactaggtacatcgtctagatctattcctatttcctcagcgatagctcttctatccttttccggaagcaatgaaatcacttcaataaatgattcaaccatgagtgtgaaactaagtcgagaattactcatgcatttgttagttattcggagcgcgcaatttttaaactgtcctataacctctcctatatgaatagcacaagtgacattagtagggatagaatgttgagctaatttttgtaaataactatctataaaaagattatacaaagttttaaactctttagtttccgccatttatccagtctgagaaaatgtctctcataataaatttttccaagaaactaattgggtgaagaatggaaacctttaatctatatttatcacagtctgttttggtacacatgatgaattcttccaatgccgtactaaattcgatatctttttcgatttctggatatgtttttaataaagtatgaacaaagaaatggaaatcgtaataccagttatgtttaactttgaaattgttttttattttcttgttaatgattccagccacttgggaaaagtcaaagtcgtttaatgccgatttaatacgttcattaaaaacaaactttttatcctttagatgaattattattggttcattggaatcaaaaagtaagatattatcgggtttaagatctgcgtgtaaaaagttgtcgcaacagggtagttcgtagattttaatgtataacagagccatctgtaaaaagataaactttatgtattgtaccaaagatttaaatcctaatttgatagctaactcggtatctactttatctgccgaatacagtgctaggggaaaaattataatgtttcctctttcatattcgtagttagttctcttttcatgttcgaaaaagtgaaacatgcggttaaaatagtttataacattaatattactgttaataactgccggataaaagtgggatagtaatttcacgaatttgatactgtcctttctctcgttaaacgcctttaaaaaaactttagaagaatatctcaatgagagttcctgaccatccatagtttgtatcaataatagcaacatatgaagaacacgtttatacagagtatgtaaaaatgttaatttatagtttaatcccatggcccacgcacacacgattaattttttttcatctccctttagattgttgtatagaaatttgggtactgtgaactccgccgtagtttccatgggactatataattttgtggcctcgaatacaaattttactacatagttatctatcttaaagactataccatatcctcctgtagatatgtgataaaaatcgtcgtttataggataaaatcgtttatccttttgttggaaaaaggatgaattaatgtaatcattctcttctatctttagtagtgtttccttattaaaattcttaaaataatttaacaatctaactgacggagcccaattttggtgtaaatctaattgggacattatattgttaaaatacaaacagtctcctaatataacagtatctgataatctatggggagacatccattgatattcaggggatgaatcattggcaacacccatttattgtacaaaaagccccaatttacaaacgaaagtccaggtttgatagagacaaacaattaactattttgtctctgtttttaacacctccacagtttttaatttctttagtaatgaaattattcacaatatcagtatcttctttatctaccagagattttactaacttgataaccttggctgtctcattcaatagggtagtaatatttgtatgtgtgatattgatatctttttgaattgtttcttttagaagtgattctttgatggtgccagcatacgaattacaataatgcagaaactcggttaacatgcaggaattatagtaagccaattccaattgttgcctgtgttgtattagagtgtcaatatgagcaatggtgtccttgcgtttctctgatagaatgcgagcagcgattttggcgttatcatttgacgatatttctggaatgacgaatcctgtttctactaactttttggtaggacaaagtgaaacaatcaagaagatagcttctcctcctatttgtggaagaaattgaactcctctagatgatctactgacgatagtatctccttgacagatattggaccgaattacagaagtacctggaatgtaaagccctgaaaccccctcattttttaagcagattgttgccgtaaatcctgcactatgcccaagatagagagctcctttggtgaatccatctctatgtttcagtttaaccaagaaacagtcagctggtctaaaatttccatctctatctaatacagcatctaacttgatgtcaggaactatgaccggtttaatgttatatgtaacattgagtaaatccttaagttcataatcatcactgtcatcagttatgtacgatccaaacaatgtttctaccggcatagtggatacgaagatgctatccatcagaatgtttccctgattagtattttctatatagctattcttctttaaacgattttccaaatcagtaactatgttcatttttttaggagtaggacgcctagccagtatggaagaggattttctagatcctctcttcaacatctttgatctcgatggaatgcaaaaccccatagtgaaacaaccaacgataaaaataatattgtttttcactttttataattttaccatctgactcatggattcattaatatctttataagagctactaacgtataattctttataactgaactgagatatatacaccggatctatggtttccataattgagtaaatgaatgctcggcaataactaatggcaaatgtatagaacaacgaaattatactagagttgttaaagttaatattttctatgagctgttccaataaattatttgttgtgactgcgttcaagtcataaatcatcttgatactatccagtaaaccgtttttaagttctggaatattatcatcccattgtaaagcccctaattcgactatcgaatatcctgctctgatagcagtttcaatatcgacggacgtcaatactgtaataaaggtggtagtattgtcatcatcgtgataaactacgggaatatggtcgttagtaggtacggtaactttacacaacgcgatatataactttccttttgtaccatttttaacgtagttgggacgtcctgcagggtattgttttgaagaaatgatatcgagaacagatttgatacgatatttgttggattcctgattattcactataatataatctagacagatagatgattcgataaatagagaaggtatatcgttggtaggataatacatccccattccagtattctcggatactctattgatgacactagttaagaacatgtcttctattctagaaaacgaaaacatcctacatggactcattaaaacttctaacgctcctgattgtgtctcgaatgcctcgtacaaggatttcaaggatgccatagattctttgaccaacgatttagaattgcgtttagcatctgatttttttattaaatcgaatggtcggctctctggtttgctaccccaatgataacaatagtcttgtaaagataaaccgcaagaaaatttatacgcatccatccaaataaccctagcaccatcggatgatattaatgtattattatagattttccatccacaattattgggccagtatactgttagcaacggtatatcgaatagattactcatgtaacctactagaatgatagttcgtgtactagtcataatatctttaatccaatctaaaaaatttaaaattagattttttacactgttaaagttaacaaaagtattacccgggtacgtggatatcatatatggcattggtccattatcagtaatagctccataaactgatacggcgatggtttttatatgtgtttgatctaacgaggaagaaattcgcgcccacaattcatctctagatatgtatttaatatcaaacggtaacacatcaatttcgggacgcgtatatgtttctaaatttttaatccaaatataatgatgacctatatgccctattatcatactgtcaactatagtacacctagggaacttacgatacatctgtttcctataatcgttaaattttacaaatctataacatgctaaaccttttgacgacagccattcattaatttctgatatggaatctgtattctcgataccgtatcgttctaaagccagtgctatatctccctgttcgtgggaacgctttcgtataatatcgatcaacggataatctgaagtttttggagaataatatgactcatgatctatttcgtccataaacaatctagacataggaattggaggcgatgatcttaattttgtgcaatgagtcgtcaatcctataacttctaatcttgtaatattcatcatcgacataatactatctatgttatcatcgtatattagtataccatgaccttcttcatttcgtgccaaaatgatatacagtcttaaatagttacgcaatatctcaatagtttcataattgttagctgttttcatcaaggtttgtatcctgtttaacatgatggcgttctataacgtctctattttctatttttaattttttaaatttttaacgatttactgtggctagatacccaatctctctcaaatatttttttagcctcgcttacaagctgtttatctatactattaaaactgacgaatccgtgattttggtaatgggttccgtcgaaatttgccgaagtgatatgaacatattcgtcgtcgactatcaacaattttgtattattctgaatagtgaaaaccttcacagatagatcattttgaacacacaacgcatctagacttttggcggttgccatagaatatacgtcgttcttatcccaattaccaactagaagtctgatcttaactcctctattaatggctgcttctataatggagttgtaaatgtcgggccaatagtagctattaccgtcgacacgtgtagtgggaactatggccaaatgttcaatatctatactagtcttagctgacctgagtttatcaataactacatcggtatctagatctctagaatatcccaataggtgttccggagaatcagtaaagaacactccacctataggattcttaatatgatacgcagtgctaactggcaaacaacaagccgcagagcataaattcaaccatgaattttttgcgctattaaaggctttaaaagtatcaaatcttctacgaagatctgtggccagcgggggataatcagaatatacacctaacgttttaatcgtatgtatagatcctccagtaaatgacgcgtttcctacataacatctttcatcatctgacacccaaaaacaaccgagtagtagtcccacattattttttttatctatattaacggttataaaatttatatccgggcagtgactttgtagctctcccagatttcttttccctcgttcatctagcaaaactattattttaatccctttttcagatgcctcttttagtttatcaaaaataagcgctcccctagtcgtactcagaggattacaacaaaaagatgctatgtatatatatttcttagctagagtgataatttcgttaaaacattcaaatgttgttaaatgatcggatctaaaatccatattttctggtagtgtttctaccagcctacattttgctcccgcaggtaccgatgcaaatggccacatttagttaacataaaaacttatacatcctgttctatcaacgattctagaatatcatcggctatatcgctaaaattttcatcaaagtcgacatcacaacctaactcagtcaatatattaagaagttccatgatgtcatcttcgtctatttctatatccgtatccattgtagattgttgaccgattatcgagtttaaatcattactaatactcaatccttcagaatacaatctgtgtttcattgtaaatttataggcggtgtatttaagttggtagattttcaattatgtattaatatagcaacagtagttcttgctcctccttgattctagcatcctcttcattattttcttctacgtacataaacatgtccaatacgttagacaacacaccgacgatggcggccgcaggatcctcaagagccagactcacatttcagctgcttttccaggccacagatgatcagttccaggccaaaaaggaatgcaggctcagccccttggtggtcaaacaactcaatagcttgccgcagcagtggtggcatggagtcagtggtgggggtctccctctcctccttggcaacttggtgctcctggtcctccagcacacagcccaaggtgaagtggcccacagcagagagggcatacaaggcattttccagggagaagccttgttggcacaggaatgccagctggttctccagggtctcatactgcttctctgtaggcctggtgcccaagtgaactttggcaccatcccggtgggagagcaaggcacatctgaagctcttggcattgttcctcaggaagtcctgccaggactccccttccagagggcagaagtgggtgtggtgcctgtccaacatctcaatggccagggcatcaagcagagccctcttgttcttcacatgccagtacagggtaggctgctccacacccagcttctgggccagcttcctggtggtcaagccctcaatgccaacttcattcaggagctccaaggcagagttgatgactttgctcttgtccagtctggacatctcgacttcgagcttatttatattccaaaaaaaaaaaataaaatttcaatttttaagcttacagacacgaatatgactaaaccgatgaccatttaaaaacccctctctagctttcacttaaactgtatcgatcattcttttagcacatgtataatataaaaacattattctatttcgaatttaggcttccaaaaatttttcatccgtaaaccgataataatatatatagacttgttaatagtcggaataaatagattaatgcttaaactatcatcatctccacgattagagatacaatatttacattctttttgctgtttcgaaactttatcaatacacgttaatacaaacccaggaaggagatattgaaactgaggctgttgaaaatgaaacggtgaatacaataattcagataatgtaaaatcatgattccgtattctgatgatattagaactgctaatggatgtcgatggtatgtatctaggagtatctattttaacaaagcatcgatttgctaatatacaattatccttttgattaattgttattttattcatattcttaaaaggtttcatatttatcaattcttctacattaaaaatttccatttttaatttatgtagccccgcaatactcctcattacgtttcattttttgtctataatatccattttgttcatctcggtacatagattatccaattgagaagcgcatttagtagttttgtacattttaagtttattgacgaatcgtcgaaaactagttatagttaacattttattatttgataccctgatattaatacccctgccgttactattatttataactgatgtaatccacgtaacattggaattaactatcgatagtaatgcatcgacgcttccaaaattgtctattataaactcaccgataatttttttattgcatgttttcatattcattaggattatcaaatctttaatcttattacgattgtatgcgttgatattacaagacgtcattctaaaagacggaggatctccatcaaatgccagacaatcacgtacaaagtacatggaaataggttttgttctattgcgcatcatagatttatatagaacacccgtagaaatactaatttgttttactctataaaatactaatgcatctatttcatcgttttgtataacgtctttccaagtgtcaaattccaaatttttttcattgatagtaccaaattcttctatctctttaactacttgcatagataggtaattacagtgatgcctacatgccgttttttgaaactgaatagatgcgtctagaagcgatgctacgctagtcacaatcaccactttcatatttagaatatatatatgtaaaaatatagtagaatttcattttgtttttttctatgctataaatgaattctcattttgcatctgctcatactccgttttatattaataccaaagaaggaagatatctggttctaaaagccgttaaagtatgcgatgttagaactgtagaatgcgaaggaagtaaagcttcctgcgtactcaaagtagataaaccctcatcgcccgcgtgtgagagaagaccttcgtccccgtccagatgcgagagaatgaataaccctggaaaacaagttccgtttatgaggacggacatgctacaaaatatgttcgcggctaatcgcgataatgtagcttctagacttttgtcctaaaatactattatatccttttcgatattaataaatccgtgtcgtccaggttttttatctctttcagtatgtgaatagataggtattttatctctattcatcatcgaatttaagagatccgataaacattgtttgtattctccagatgtcagcatctgatacaacaatatatgtgcacataaacctctggcacttatttcatgtaccttccccttatcactaaggagaatagtatttgagaaatatgtatacatgatattatcatgaattagatatacagaatttgtaacactctcgaaatcacacgatgtgtcggcgttaagatctaatatatcactcgataacacattttcatctagatacactagacattttttaaagctaaaatagtctttagtagtaacagtaactatgcgattattttcatcgatgatacatttcatcggcatattattacgcttaccatcaaagactataccatgtgtatatctaacgtattctagcatggttgccatacgcgcattaaacttttcaggatctttggatagatcttccaatctatctatttgagaaaacatttttatcatgttcaatagttgaaacgtcggatccactatatagatattatctataaagattttaggaactacgttcatggtatcctggcgaatattaaaactatcaatgatatgattatcgttttcatcttttatcaccatatagtttctaagatatgggattttacttaatataatattatttcccgtgataaattttattagaaaggccaaatctataagaaaagtcctagaattagtctgaagaatatctatatcgccgtatagtatatttggattaattagatatagagaatatgatccgtaacatatacaacttttattatggcgtctaagatattcttccatcaacttattaacatttttgactagggaagatacattatgacgtcccattacttttgccttgtctattactgcgacgttcatagaatttagcatatctcttgccaattcttccattgatgttacattataagaaattttagatgaaattacatttggagctttaatagtaagaactcctaatatgtccgtgtatgtggtcactaatacagattgtagttctataatcgtaaataatttacctatattatatgtttgagtctgtttagaaaagtagctaagtatacgatcttttatttctgatgcagatgtattaacatcggaaaaaaatctttttttattcttttttactaaagatacaaatatgtctttgttaaaaacagttattttctgaatatttctagcttgtaattttaacatatgatattcgttcacactaggtactctgcctaaataggtttctataatctttaatgtaatattaggaaaagtattctgatcaggattcctattcattttgaggatttaaaactctgattattgtctaatatggtctctacgcaaactttttcacagagcgatagagtttttgataactcgtttttcttaagaaatataaaactactgtctccagagctcgctctatcttttattttatctaattcgatacaaactcctgatactggttcagaaagtaattcattaattttcagtcctttatagaagatatttaatatagataatacaaaatcttcagtttttgatatcgatctgattgatcctagaactagatatattaataacgtgctcattaggcagtttatggcagcttgataattagatatagtatattccagttcatatttattagataccgcattgcccagattttgatattctatgaattcctctgaaaataaatccaaaataactagacattctattttttgtggattagtgtactctcttccctctatcatgttcactactggtgtccacgatgataaatatctagagggaatataatatagtccataggatgccaatctagcaatgtcgaataactgtaattttattcttcgctcttcattatgaattgattcttgaggtataaacctaacacaaattatattattagacttttcgtatgtaatgtctttcatgttataagtttttaatcctggaatagaatctattttaatgaggcttttaaacgcagagttctccaacgagtcaaagcataatactctgttgtttttcttatatacgatgttacgattttcttctttgaatggaataggtttttgaattagtttataattacaacataatagataaggaagtgtgcaaatagtacgcggaaaaaacataatagctcccctgttttcatccatggttttaagtaaatgatcactggcttctttagtcaatggatattcgaacattaaccgtttcatcatcattggacagaatccatatttcttaatgtaaagagtgatcaaatcattgtgtttattgtaccatcttgttgtaaatgtgtattcggttatcggatctgctcctttttctattaaagtatcgatgtcaatctcgtctaagaattcaactatatcgacatatttcatttgtatacacataaccattactaacgtagaatgtataggaagagatgtaacgggaacagggtttgttgattcgcaaactattctaatacataattcttctgttaatacgtcttgcacgtaatctattatagatgccaagatatctatataattattttgtaagatgatgttaactatgtgatctatataagtagtgtaataattcatgtattttgatatatgttccaactctgtctttgtgatgtctagtttcgtaatatctatagcatcctcaaaaaatatattcgcatatattcccaagtcttcagttctatcttctaaaaaatcttcaacgtatggaatataataatctattttacctcttctgatatcattaatgatatagtttttgacactatcttctgtcaattgattcttattcactatatctaagaaacggatagcgtccctaggacgaactactgccattaatatctctattatagcttctggacataattcatctattataccagaattaatgggaactattccgtatctatctaacatagttttaagaaagtcagaatctaagacttgatgttcatatattggttcatacatgaaatgatctctattgatgatagtgactatttcattctctgaaaattggtaactcattctatatatgctttccttgttgatgaaggatagaatatactcaatagaatttgtaccaacaaactgttctcttatgaatcgtatatcatcatctgaaataatcatgtaaggcatacatttaacaattagagacttgtctcctgttatcaatatactattcttgtgataatttatgtgtgaggcaaatttgtccacgttctttaattttgttatagtagatatcaaatccaatggagctacagttcttggcttaaacagatatagtttttctggaacaaattctacaacattattataaaggactttgggtagataagtgggatgaaatcctattttaattaatgcgatagccttgtcctcgtgcagatatccaaacgcttttgtgatagtatggcattcattgtctagaaacgctctacgaatatctgtgacagatatcatctttagagaatatactagtcgcgttaatagtactacaatttgtattttttaatctatctcaataaaaaaattaatatgtatgattcaatgtataactaaactactaactgttattgataactagaatcagaatctaatgatgacgtaaccaagaagtttatctactgccaatttagctgcattatttttagcatctcgtttagattttccatcggccttatcgaatactcttccgtcgatgtctacacaggcataaaatgtaggagagttactaggcccaactgattcaatacgaaaagaccaatctctcctagtaatttggcagtactcattaataacggtgacagggttagcatctttccaatcaataatttttttagccggaataacatcatcaaaagacttatgatcctctctcattgatttttcgcgggatacatcatctattatgacgtcagccatagcatcagcatccggcttatccgcctccgttgtcataaaccaacgaggaggaatatcgtcggagctgtacaccatagcactacgttgaagatcgtacagagctttattaacttctcgcttctccatattaagttgtctagttagttgtgcagcagtagctccttcgattccaatgtttttaatagccgcacacacaatctctgcgtcagaacgctcgtcaatatagatcttagacatttttagagagaactaacgcaaccagcaataaaactgaacctactttatcatttttttattcatcatcctctggtggttcgtcgttcctatcaaatgtagctctgattaacccgtcatctataggtgatgctggttctggagattctggaggagatggattattatctggaagaatctctgttatttccttgttttcatgtatcgattgcgttgtaacattaagattgcgaaatgctctaaatttgggaggcttaaagtgttgtttgcaatctctacacgcgtgtctaactagtggaggttcgtcagctgctctagtttgaatcatcatcggcgtagtattcctacttttacagttaggacacggtgtattgtatttctcgtcgagaacgttaaaataatcgttgtaactcacatcctttattttatctatattgtattctactcctttcttaatgcattttataccgaataagagatagcgaaggaattctttttcggtgccgctagtacccttaatcatatcacatagtgttttatattccaaatttgtggcaatagacggtttatttctatacgatagtttgtttctggaatcctttgagtattctataccaatattattctttgattcgaatttagtttcttcgatattagattttgtattacctatattcttgatgtagtactttgatgatttttccatggcccattctattaagtcttccaagttggcatcatccacatattgtgatagtaattctcggatatcagtagcggctaccgccattgatgtttgttcattggatgagtaactactaatgtatacattttccatttataacacttatgtattaactttgttcatttatattttttcattattatgttgatattaacaaaagtgaatatatatatgttaataattgtattgtggttatacggctacaattttataatgagtgaaagtcagtgtccgatgatcaatgacgatagctttactctgaaaagaaagtatcaaatcgatagtgcggagtcaacaataaaaatggataagaagaggataaagtttcagaatagagccaaaatggtaaaagaaataaatcagacaataagagcagcacaaactcattacgagacattgaaactaggatacataaaatttaagagaatgattatgactactactctagaagatatagcaccatctattccaaataatcagaaaacttataaactattctcggacatttcagccatcggcaaagcatcacagaatccgagtaagatggtatatgctctgctgctttacatgtttcccaatttgtttggagatgatcatagattcattcgttatagaatgcatccaatgagtaaaatcaaacacaagatcttctctcctttcaaacttaatcttattagaatattagtggaagaaagattctataataatgaatgcagatctaataaatggagaataattggaacacaagttgataaaatgttgatagctgaatctgataaatatacaatagatgcaaggtataacctaaaacccatgtatagaatcaagggagaatctgaagaagataccctctttatcaaacagatggtagaacaatgtgtgacatcccaggaattggtggaaaaagtgttgaagatactgtttagagatttgttcaagagtggagaatacaaagcgtacagatacgatgatgatgtagaaaatggatttattggattggatacactaaaattaaacattgttcatgatatagttgaaccatgtatgcctgttcgtaggccagtggctaagatactgtgtaaagaaatggtaaataaatactttgagaatccgctacatattattggtaaaaatcttcaagagtgcattgactttgttagtgaataggcatttcatctttctccaatactaattcaaattgttaaattaataatggatagtataaatagttattagttataagatagtaaaaataattattagaataagagtgtagtatcatagataactctcttctataaaaatggattttattcgtagaaagtatcttatatacacagtagaaaataatatagattttttaaaggatgatacattaagtaaagtaaacaattttaccctcaatcatgtactagctctcaagtatctagttagcaattttcctcaacacgttattactaaggatgtattagctaataccaatttttttgttttcatacatatggtacgatgttgtaaagtgtacgaagcggttttacgacacgcatttgatgcacccacgttgtacgttaaagcattgactaagaattatttatcgtttagtaacgcaatacaatcgtacaaggaaaccgtgcataaactaacacaagatgaaaaatttttagaggttgccgaatacatggacgaattaggagaacttataggcgtaaattatgacttagttcttaatccattatttcacggaggggaacccatcaaagatatggaaatcatttttttaaaactgtttaagaaaacagacttcaaagttgttaaaaaattaagtgttataagattacttatttgggcatacctaagcaagaaagatacaggcatagagtttgcggataatgatagacaaaatatatacactctatttcaacaaactggtagaatcgtccatagcaatctaacagaaacgtttagagattatatctttcccggagataagactagctattgggtgtggttaaacgaaagtatagctaatgatgcggatatcgttcttaatagacacgccattaccatgtatgataaaattcttagttatatatactctgagataaaacaaggacgcgttaataaaaacatgcttaagttagtttatatctttgagcctgaaaaagatatcagagaacttctgctagaaatcatatatgatattcctggagatatcctatctattattgatgcaaaaaacgacgattggaaaaaatattttattagtttttataaagctaattttattaacggtaatacatttattagtgatagaacgtttaacgaggacttattcagagttgttgttcaaatagatcccgaatatttcgataatgaacgaattatgtctttattctctacgagtgctgcggacattaaacgatttgatgagttagatattaataacagttatatatctaatataatttatgaggtgaacgatatcacattagatacaatggatgatatgaagaagtgtcaaatctttaacgaggatacgtcgtattatgttaaggaatacaatacatacctgtttttgcacgagtcggatcccatggtcatagagaacggaatactaaagaaactgtcatctataaaatccaagagtagacggctgaacttgtttagcaaaaacattttaaaatattatttagacggacaattggctcgtctaggtcttgtgttagatgattataaaggagacttgttagttaaaatgataaaccatcttaagtctgtggaggatgtatccgcattcgttcgattttctacagataaaaaccctagtattcttccatcgctaatcaaaactattttagctagttataatatttccatcatcgtcttatttcaaaggtttttgagagataatctatatcatgtagaagaattcttggataaaagcatccatctaaccaagacggataagaaatatatacttcaattgataagacacggtagatcatagaacagaccaaatatattattaataatttgtatatacatagatataattatcacacatttttgataaatgggaactgctgcaacaattcagactcccaccaaattaatgaataaagaaaatgcagaaatgattttggaaaaaattgttgatcatatagttatgtatattagtgacgaatcaagtgattcagaaaataatcctgaatatattgattttcgtaacagatacgaagactatagatctctcattataaaaagtgatcacgagtttgtaaagctatgtaaaaatcatgcggagaaaagttctccagaaacgcaacaaatgattatcaaacacatatacgaacaatatcttattccagtatctgaagtactattaaaacctataatgtccatgggtgacataattacatataacggatgtaaagacaatgaatggatgctagaacaactctctaccctaaactttaacaatctccgcacatggaactcatgtagcataggcaatgtaacgcgtctgttttatacattttttagttatctgatgaaagataaactaaatatataagtataatcccattctaatactttaacctgatgtattagcatcttattagaatattaacctaactaaaagacataacataaaaactcattacatagttgataaaaagcggtaggatataaatattatggctgccaccgttccgcgttttgacgacgtgtacaaaaatgcacaaagaagaattctagatcaagaaacattttttagtagaggtctaagtagaccgttaatgaaaaacacatatctatttgataattacgcgtatggatggataccagaaactgcaatttggagtagtagatacgcaaacctagatgctagtgactattatcccatttcgttgggattacttaaaaagttcgagtttctcatgtctctatataaaggtcctattcccgtatatgaagaaaaagtaaatactgaattcatagccaatggatcgttctctggtagatacgtatcatatcttcgaaagttttctgcccttccaacaaacgagtttattagttttttgttactgacttccattccaatctataatatcttgttctggtttaaaaacacacagtttgatattactaaacacacattattcagatacgtctatacagataatgccaaacacctggcgttggctaggtatatgcatcaaacaggagactataagcctttgtttagtcgtctcaaagagaattatatatttaccggtcccgttccaataagtatcaaagatatagatcaccctaatcttagtagagcaagaagtccatccgattatgagacattagctaatattagtactatattgtactttaccaagtatgatccggtattaatgtttttattgttttacgtacctgggtattcaattactacaaaaattactccagccgtagaatatctaatggataaactgaatctaacaaagagcgacgtacaactgttgtaaattattttatgcttcgtaaaatgtaggttttgaaccaaacattctttcaaagaatgagatgcataaaactttattatccaatagattgactatttcggacgtcaatcgtttaaagtaaacttcgtaaaatattctttgatcactgccgagtttaaaacttctatcgataattgtctcatatgttttaatatttacaagttttttggtccatggtacattagccggacaaatatatgcaaaataatatcgttctccaagttctatagtttctggattatttttattatattcagtaactaaatacatattagggttatctgcggatttataatttgagtgatgcattctactcaacataaataattctagaggagacgatctactatcaaattcggatcgtaaatctgtttctaaagaacggagaatatctatacatacctgattagaattcatccgtccttcagacaacatctcagacagtctggttttgtacatcttaatcatattcttatgaaacttggaaacatctcttctagtttcactagtacctttattaattctctcaggtacagattttgaattcgacgatgctgagtatttcatcgttgtatatttcttcttcgattgcataatcagattcttatataccgcctcaaactctattttaaaattattaaacaatactctattattaatcagtcgttctaactctttcgctatttctatagacttatctacatcttgactgtctatctctgtaaacacggagtcggtatctccatacacgctacgaaaacgaaatctgtaatctataggcaacgatgttttcacaatcggattaatatctctatcgtccatataaaatggattacttaatggattggcaaaccgtaacataccgttagataactctgctccatttagtaccgattctagatacaagatcattctacgtcctatggatgtgcaactcttagccgaagcgtatgagtatagagcactatttctaaatcccatcagaccatatactgagttggctactatcttgtacgtatattgcatggaatcatagatggccttttcagttgaactggtagcctgttttagcatctttttatatctggctctctctgccaaaaatgttcttaatagtctaggaatggttccttctatcgatctatcgaaaattgctatttcagagatgaggttcggtagtctaggttcacaatgaaccgtaatatatctaggaggtggatatttctgaagcaatagctgattatttatttcttcttccaatctattggtactaacaacgacaccgactaatgtttccggagatagatttccaaagatacacacattaggatacagactgttataatcaaagattaatacattattactaaacattttttgttttggagcaaataccttaccgccttcataaggaaacttttgttttgtttctgatctaactaagatagttttagtttccaacaatagctttaacagtggacccttgatgactgtactcgctctatattcgaataccatggattgaggaagcacatatgttgacgcacccgcgtctgtttttgtttctactccataatactcccacaaatactgacacaaacaagcatcatgaatacagtatctagccatatctaaagctatgtttagattataatccttatacatctgagctaaatcaacgtcatcctttccgaaagataatttatatgtatcattaggtaaagtaggacataatagtacgactttaaatccattttcccaaatatctttacgaattactttacatataatatcctcatcaacagtcacataattacctgtggttaaaacctttgcaaatgcagcggctttgcctttcgcgtctgtagtatcgtcaccgatgaacgtcatttctctaactcctctatttaatactttacccatgcaactgaacgcgttcttggatatagaatccaatttgtacgaatccaatttttcaaatttttgaatgaatgaatatagatcgaaaaatatagttccattattgttattaacgtgaaacgtagtattggccatgccgcctactcccttatgactagactgatttctctcataaatacagagatgtacagcttcctttttgtccggagatctaaagataattttctctcctgttaataactctagacgattagtaatatatctcagatcaaagttatgtccgttaaaggtaacgacgtagtcgaacgttagttccaacaattgtttagctattcgtaacaaaactatttcagaacatagaactagttctcgttcgtaatccatttccattagtgactgtatcctcaaacatcctctatcgacggcttcttgtatttcctgttccgttaacatctcttcattaatgagcgtaaacaataatcgtttaccacttaaatcgatataacagtaacttgtatgcgagattgggttaataaatacagaaggaaacttcttatcgaagtgacactctatatctagaaataagtacgatcttgggatatcgaatctaggtatttttttagcgaaacagttacgtggatcgtcacaatgataacatccattgttaatctttgtcaaatattgctcgtccaacgagtaacatccgtctggagatatcccgttagaaatataaaaccaactaatattgagaaattcatccatggtggcattttgtatgctgcgtttctttggctcttctatcaaccacatatctgcgacggagcattttctatctttaatatctagattataacttattgtctcgtcaatgtctatagttctcatctttcccaacggcctcgcattaaatggaggaggagacaatgactgatatatttcgtccgtcactacgtaataaaagtaatgaggaaatcgtataaatacggtctcgccatttcgacatctggatttcagatataaaaatctgttttcaccgtgactttcaaaccaattaatgcaccgaacatccatttatagaatttagaaatatattttcatttaaatgaatcccaaacattggggaagagccgtatggaccattatttttatagtactttcgcaagcgggtttagacggcaacatagaagcgtgtaaacgaaaactatatactatagttagcactcttccatgtcctgcatgtagacggcacgcgactatcgctatagaggacaataatgtcatgtctagcgatgatctgaattatatttattattttttcatcagattatttaacaatttggcatctgatcccaaatacgcgatcgatgtgacaaaggttaaccctttataaacttaacccattataaaacttatgattagtcacaactgaaataaccgcgtgattattttttggtataattctacacggcatggtttctgtgactatgaattcaacccccgttacattagtgaaatctttaacaaacagcaagggttcgtcaaagacataaaactcattgtttacaatcgaaatagaccccctatcacacttaaaataaaaaatatccttatcctttaccaccaaataaaattctgattggtcaatgtgaatgtattcacttaacagttccacaaatttatttattaactccgaggcacatacatcgtcggtattttttatggcaaactttactcttccagcatccgtttctaaaaaaatattaacgagttccatttatatcatccaatattattgaaatgacgttgatggacagatgatacaaataagaaggtacggtacctttgtccaccatctcctccaattcatgctctattttgtcattaactttaatgtatgaaaacagtacgccacatgcttccatgacagtgtgtaacactttggatacaaaatgtttgacattagtataattgtccaagactgtcaatctataatagatagtagctataatatattctatgatggtattgaagaagatgacaaccttggcatattgatcatttaacacagacatggtatcaacagatagcttgaatgaaagagaatcagtaattggaataagcgtcttctcgatagagtgtccgtataccaacatgtctgatattttgatgtattccattaaattatttagttttttctttttattctcgttaaacagcatttctgtcaacggaccccaacatcgttgaccgattaagttttgattgatttttccgtgtaaggcgtatctagtcagatcgtatagcctatccaataatccatcgtctgtgtgtagatcacatcgtacactttttaattctctatagaagagcgacagacatctggagcaattacagacagcaatttctttattctctacagatgtaagatacttgaagacattcctatgatgatgcagaattttggataacacggtattgatggtatctgttaccataattcctttgatggctgatagtgtcagagcacaagatttccaatctttgacaatttttagcaccattatctttgttttgatatctatatcagacagcatggtgcgtctgacaacacagggattaagacggaaagatgaaatgattctctcaacatcttcaatagataccttgctattttttctggcattatctatatgtgcgagaatatcctctagagaatcagtatcctttttgatgatagtggatctcaatgacatgggacgtttaaaccttcttattctatcaccagattgcatggtgatttgtcttctttcttttatcataatgtaatctctaaattcatcggcaaattgtctatatctaaaatcataatatgagatgtttacctctacaaatatctgttcgtccaatgttagagtatttacatcagttttgtattccaaattaaacatggcaacggatttaattttatattcctctattaagtcctcgtcgataataacagaatgtagataatcatttaatccgtcgtacatggttggaagatgcttgttgacaaaatctttaattgtcttgatgaaggtgggactatatctaacatcttgattaataaaatttataacattgtccataggatactttgtaactagttttatacacatctcttcatcggtaagtttagacagaatatcgtgaacaggtggtatattatattcatcagatatacgaagaacaatgtccaaatctatattgtttaatatattatatagatgtagcgtagctcctacaggaatatctttaactaagtcaatgatttcatcaaccgttagatctattttaaagttaatcatataggcattgatttttaaaaggtatgtagccttgactacattctcattaattaaccattccaagtcattgtgtgtaagaagattatattctatcataagcttgactacatttggtcccgataccattaaagaattcttatgatataaggaaacagattttaggtactcatctactctacaagaattttggagagccttaacgatatcagtgacgtttattatttcaggaggaaagaatctaacattgagaatatcggaattaatagcttccagatacagtgattttggcaatagtccgtgtaatccataatccagtaacacgagctggtgcttgctagacaccttttcaatgtttaatttttttgaaataagctttgataaagccttcctcgcaaattccggatacatgaacatgtcggcgacatgattaagtattgttttttcattatttttatattttctcaacaagttctcaataccccaatagatgatagaatatcacccaatgcgtccatgttgtctatttccaacaggtcgctatatccaccaatagaagtttttccaaaaaagattctaggaacagttctaccaccagtaatttgttcaaaataatcccgcaattcattttcgggtttaaattctttaatatcgacaatttcatacgctcctcttttgaaactaaacttatttagaatatccagtgcatttctacaaaaaggacatgtatacttgacaaaaattgtcactttgttattggccaacctttgttgtacaaattcctcggccattttaatatttaagtgatataaaactatctcgacttatttaactctttagtcgagatatatggacgcagatagctatatgatagccaactacagaaggcaaacgctataaaaaacataattacgacgagcatatttataaatatttttattcagcattacttgatatagtaatattaggcacagtcaaacattcaaccactctcgatacattaactctctcattttctttaacaaattctgcaatatcttcgtaaaaagattcttgaaactttttagaatatctatcgactctagatgaaatagcgttcgtcaacatactatgttttgtatacataaaggcgcccattttaacagtttctagtgacaaaatgctagcgatcctaggatcctttagaatcacatagattgacgattcgtctctcttagtaactctagtaaaataatcatacaatctagtacgcgaaataatattatccttgacttgaggagatctaaacaatctagttttgagaacatcgataagttcatcgggaatgacatacatactatctttaatagaactcttttcatccagttgaatggattcgtccttaaccaactgattaatgagatcttctattttatcattttccagatgatatgtatgtccattaaagttaaattgtgtagcgcttctttttagtctagcagccaatactttaacatcactaatatcgatatacaaaggagatgatttatctatggcattaagaattcgtttttcgacatccgtcaaaaccaattcctttttgcctgtatcatccagttttccatcctttgtaaagaaattattttctactagactattaataagactgataaggattcctccataattgcacaatccaaactttttaacaaaactagactttacgagatctacaggaatgcgtacttcaggttttttagcttgtgattttttcttttgcggacattttctagtaaccaactcatctaccatttcattgattttagcagtgaaataagctttcaatgcacgggcactgatactattgaaaacgagttgatcttcaaattccgccatttaagttcaccaaacaacttttaaatacaaatatatcaatagtagtagaataagaactataaaaaaaataataattaaccaaccccaacaaccggtattattagttgatgtggtagttttctcatcacttagaacagatttaacaatttctataaagtctgtcaaatcatcttccggagaccccataaatacaccaaatatagcggcgtacaacttatccatttatacattgaatattggcttttctttatcgctatcttcatcatattcatcatcaatatcaacaagtcccagattacgagccagatcttcttctacattttcagtcattgatacacgttcactatctccagagagtccgataacgttagccaccacttctctatcaatgattagtttcttgagcgcgaaagtaatttttgtttccgttccggatctatagaagacgataggtgtgataattgccttggccaattgtctttctcttttactgagtgattctagttcaccttctatagatctgagaatggatgattctccagtcgaaacatattctaccatggatccgtttaatttgttgatgaagatggattcatccttaaatgttttctctgtaatagtttccaccgaaagactatgcaaagaatttggaatgcgttccttgtgcttaatgtttccatagacggcttctagaagttgatacaacataggactagccgcggtaacttttatttttagaaagtatccatcgcttctatcttgtttagatttatttttataaagtttagtctctccttccaacataataaaagtggaagtcatttgactagataaactatcagtaagttttatagagatagacgaacaattagcgtattgagaagcatttagtgtaacgtattcgatacattttgcattagatttactaatcgattttgcatactctataacacccgcacaagtctgtagagaatcgctagatgcagtaggtcttggtgaagtttcaactctcttcttgattaccttactcatgattaaacctaaataattgtactttgtaatataatgatatatattttcactttatctcatttgagaataaaaatgtttttgtttaaccactgcatgatgtacagatttcggaatcgcaaaccaccagtggttttattttatccttgtccaatgtgaattgaatgggagcggatgcgggtttcgtacgtagatagtacattcccgtttttagaccgagactccatccgtaaaaatgcatactcgttagtttggaataactcggatctgctatatggatattcatagattgactttgatcgatgaaggctcccctgtctgcagccatttttatgatcgtcttttgtggaatttcccaaatagttttataaactcgcttaatatcttctggaaggtttgtattctgaatggatccaccatctgccataatcctattcttgatctcatcattccataattttctctcggttaaaactctaaggagatgcggattaactacttgaaattctccagacaatactctccgagtgtaaatattactggtatacggttccaccgactcattatttcccaaaatttgagcagttgatgcagtcggcataggtgccaccaataaactatttctaagaccgtatgttctgattttatcttttagaggttcccaattccaaagatccgacggtacaacattccaaagatcatattgtagaataccgttactggcgtacgatcctacatatgtatcgtatggtccttccttctcagctagttcacaactcgcctctaatgcaccgtaataaatggtttcgaagatcttcttatttagatcttgtgcttccaggctatcaaatggataatttaagagaataaacgcgtccgctaatccttgaacaccaataccgataggtctatgtctcttattagagatttcagcttctggaataggataataattaatatctataattttattgagatttctgacaattactttgaccacatccttcagtttgagaaaatcaaatcgcccatctattacaaacatgttcaaggcaacagatgccagattacaaacggctacctcattagcatccgcatattgtattatctcagtgcaaagattactacacttgatagttcctaaattttgttgattactctttttgttacacgcatccttataaagaatgaatggagtaccagtttcaatctgagattctataatcgctttccagacgactcgagcctttattatagatttgtatctcctttctctttcgtatagtgtatacaatcgttcgaactcgtctccccaaacattgtccaatccaggacattcatccggacacatcaacgaccactctccgtcatccttcactcgtttcataaagagatcaggaatccaaagagctataaatagatctctggttctatgttcctcgtttcctgtattctttttaagatcgaggaacgccataatatcagaatgccacggttccaagtatatggccataactccaggccgtttgtttcctccctgatctatgtatctagcggtgttattataaactctcaacattggaataataccgtttgatataccattggtaccggagatatagcttccactggcacgaatattactaattgatagacctattccccctgccattttagagattaatgcgcatcgttttaacgtgtcatagataccctctatgctatcatcgatcatgttaagtagaaaacagctagacatttggtgacgactagttcccgcattaaataaggtaggagaagcgtgcgtaaaccatttttcagaaagtagattgtacgtctcaatagctgagtctatatcccattgatgaattcctactgcgacacgcattaacatgtgctgaggtctttcaacgatcttgttgtttattttcaacaagtaggatttttccaaagttttaaaaccaaaatagttgtatgaaaagtctcgttcgtaaataataaccgagttgagtttatccttatatttgttaactatatccatggtgatacttgaaataatcggagaatgtttcccatttttaggattaacatagttgaataaatcctccatcacttcactaaatagtttttttgtttccttgtgtagatttgatacggctattctggcggctagaatggcataatccggatgttgtgtagtacaagtggctgctatttcggctgccagagtgtccaattctaccgttgttactccattatatattccttgaataaccttcatagctattttaataggatctatatgatccgtgtttaagccataacataattttctaatacgagacgtgattttatcaaacatgacattttccttgtatccatttcgtttaatgacaaacatttttgttggtgtaataaaaaaattatttaacttttcattaatagggatttgacgtatgtagcgtacaaaatgattgttcctggtatatagataaagagtcctatatatttgaaaatcgttacggctcgattaaactttaatgattgcatagtgaatatatcattaggatttaactccttgactatcatggcggcgccagaaattaccatcaaaagcattaatacagttataccgatcgcagttagaacggttatagcatccaccatttatatctaaaaattagatcaaagaatatgtgacaaagtcctagttgtatactgagaattgacgaaacaatgtttcttacatatttttttcttattagtaaccgacttaatagtaggaactggaaaactagacttgattattctataagtatagatacccttccaaataatattctctttgataaaagttccagaaaatgtagaattttttaaaaagttatcttttgctattaccaagattgtgtttagacgcttattattaatatgagtgatgaaatccacaccgcctctagatatcgcctttatttccacattagatggtaaatccaatagtgaaactatctttttaggaatgtatggactcgcgtttagaggagtaaacgtcttaggcgtcggaaaggatgattcatcaaacgaataaacaatttcacaaatggatgttaatgtattagtaggaaattttttgacgctattggaattgaagattctaatggatgatgttctacctatttcatccgataacatgttaatttccgacaccaacggttttaatatttcgatgatatacggtagtctctctttcggacttatatagcttattccacaatacgagtcattatatactccaaaaaacaaaataactagtataaaatctgtatcgaatgggaaaaacgaaattatcgacataggtatagaatccggaacattgaacgtattaatacttaattctttttctgtggtaagtaccgataggttattgacattgtatggttttaaatattctataacttgagacttgatagatattagtgatgaattgaaaattatttttatcaccacgtgtgtttcaggatcatcgtcgacgcccgtcaaccaaccgaacggagtaaaataaatatcattaatatatgctctagatattagtatttttatcaatcctttgattatcatcttctcgtaggcgaatgattccatgatcaagagtgatttaagaacatcctccggagtattaatgggcttagtaaacagtccatcgttgcaataataaaagttatccaagttaaaggatattatgcattcgtttaaagatatcacctcatctgacggagacaattttttggtaggttttagagactttgaagctacttgtttaacaaagttattcatcgtcgtctactattctatttaattttgtagttaatttatcacatatcacattaattgactttttggtccacttttccatacgtttatattcttttaatcctgcgttatccgtttccgttatatccagggatagatcttgcaagttaaatagaatgctcttaaataatgtcattttcttatccgctaaaaatttaaagaatgtataaacctttttcagagatttgaaactcttaggtggtgtcctagtacacaatatcataaacaaactaataaacattccacattcagattccaacagctgattaacttccacattaatacagcctattttcgctccaaatgtacattcgaaaaatctgaataaaacatcgatgtcacaatttgtattatccaatacagaatgtttgtgattcgtgttaaaaccatcggagaaggaatagaaataaaaattattatagtggtggaattcagttggaatattgcctccggagtcataaaaggatactaaacattgttttttatcataaattacacatttccaatgagacaaataacaaaatccaaacattacaaatctagaggtagaacttttaattttgtctttaagtatatacgataagatatgtttattcataaacgcgtcaaatttttcatgaatcgctaaggagtttaagaatctcatgtcaaattgtcctatataatccacttcggatccataagcaaactgagagactaagttcttaatacttcgattgctcatccaggctcctctctcaggctctattttcatcttgacgacctttggattttcaccagtatgtattcctttacgtgataaatcatcgattttcaaatccatttgtgagaagtctatcgccttagatactttttcccgtagtcgaggtttaaaaaaatacgctaacggtatactagtaggtaactcaaagacatcatatatagaatggtaacgcgtctttaactcgtcggttaactctttcttttgatcgagttcgtcgctactattgggtctgctcaggtgccccgactctactagttccaacatcataccgataggaatacaagacactttgccggcggttgtagatttatcatatttttccactacatatccgttacaatttgttaaaaatttagatacatctatattgctacataatccagctagtgaatatatatgacataataaattggtaaatcctagttctggtattttactaattactaaatctgtatatctttccatttatcatggaaaagaatttaccagatatcttcttttttccaaactgcgttaatgtattctcttacaaatattcacaagatgaattcagtaatatgagtaaaacggaacgtgatagtttctcattggccgtgtttccagttataaaacatagatggcataacgcacacgttgtaaaacataaaggaatatacaaagttagtacagaagcacgtggaaaaaaagtatctcctccatcactaggaaaacccgcacacataaacctaaccgcgaagcaatatatatacagtgaacacacaataagctttgaatgttatagttttctaaaatgtataacaaatacagaaatcaattcgttcgatgagtatatattaagaggactattagaagctggtaatagtttacagatattttccaattccgtaggtaaacgaacagatactataggtgtactagggaataagtatccatttagcaaaattccattggcctcattaactcctaaagcacaacgagagatattttcagcgtggatttctcatagacctgtagttttaactggaggaactggagtgggtaagacgtcacaggtacccaagttattgctttggtttaattatttatttggtggattctctactctagataaaatcactgactttcacgaaagaccagtcattctatctcttcctaggatagctttagttagattgcatagcaataccattttaaaatcattgggatttaaggtactagatggatctcctatttctttacggtacggatctataccggaagaattaataaacaaacaaccaaaaaaatatggaattgtattttctacccataagttatctctaacaaaactatttagttatggcactcttattatagacgaagttcatgagcatgatcaaataggagatattattatagcagtagcgagaaagcatcatacgaaaatagattctatgtttttaatgactgccacgttagaggatgacagggaacggctaaaagtatttttacctaatcccgcatttatacatattcctggagatacactgtttaaaattagcgaggtatttattcataataagataaatccatcttccagaatggcatacatagaagaagaaaagagaaatttagttactgctatacagatgtatactcctcctgatggatcatccggtatagtctttgtggcatccgttgcacagtgtcacgaatataaatcatatttagaaaaaagattaccgtatgatatgtatattattcatggtaaggtcttagatatagacgaaatattagaaaaagtgtattcatcacctaatgtatcgataattatttctactccttatttggaatccagcgttactatacgcaatgttacacacatttatgatatgggtagagtttttgtccccgctccttttggaggatcgcaacaatttatttctaaatctatgagagatcaacgaaaaggaagagtaggaagagttaatcctggtacatacgtctatttctatgatctgtcttatatgaagtctatacagcgaatagattcagaatttctacataattatatattgtacgctaataagtttaatctaacactccccgaagatttgtttataatccctacaaatttggatattctatggcgtacaaaggaatatatagactcgttcgatattagtacagaaacatggaataaattattatccaattattatatgaagatgatagagtatgctaaactttatgtactaagtcctattctcgctgaggagttggataactttgagaggacgggagaattaactagtattgtacgagaagccattttatctctaaatttacaaattaagattttaaattttaaacataaagatgatgatacgtatatacacttttgtaaaatattattcggtgtctataacggaacaaacgctactatatattatcatagacctctaacgggatatatgaatatgatttcagatactatatttgttcctgtagataataactaaaaatcaaactctaatgaccacatctttttttagagatgaaaaattttccacatctccttttgtagacacgactaaacattttgcagaaaaaagtttattagtgtttagataatcgtatacttcatcagtgtagatagtaaatgtgaacagataaaaggtattcttgctcaatagattggtaaattccatagaatatattaatcctttcttcttgagatcccacatcatttcaaccagagacgttttatccaatgatttacctcgtactataccacatacaaaactagattttgcagtgacgtcgtacctggtattcctaccaaacaaaattttacttttagttcttttagaaaattctaaggtagaatctctatttgccaatatgtcatctatggaattaccactagcaaaaaatgatagaaatatatattgatacatcgcagctggttttgatctactatactttaaaaacgaatcagattccataattgcctgtatatcatcagctgaaaaactatgttttacacgtattccttcggcatttctttttaatgatatatcttgtttagacaatgataaagttatcatgtccatgagagacgcgtctccgtatcgtataaatatttcattagatgttagacgcttcattaggggtatacttctataaggtttcttaatcagtccatcattggttgcgtcaagaactactatcggatgttgttgggtatctctagtgttacacatggccttactaaagtttgggtaaataactatgatatctctattaattatagatgcatatatttcattcgtcaaggatattagtatcgacttgctatcgtcattaatacgtgtaatgtaatcatataaatcatgcgatagccaaggaaaatttaaatagatgttcatcatataatcgtcgctataattcatattaatacgttgacattgactaatttgtaatatagcctcgccacgaagaaagctctcgtattcagtttcatcgataaaggataccgttaaatataactggttgccgatagtctcatagtctattaagtggtaagtttcgtacaaatacagaatccctaaaatattatctaatgttggattaatctttaccataactgtataaaatggagacggagtcataactattttaccgtttgtacttactggaatagatgaaggaataatctccggacatgctggtaaagacccaaatgtctgtttgaagaaatccaatgttccaggtcctaatctcttaacaaaaattacgatattcgatcccgatatcctttgcattctatttaccagcatatcacgaactatattaagattatctatcatgtctattctcccaccgttatataaatcgcctccgctaagaaacgttagtatatccatacaatggaatacttcatttctaaaatagtattcgttttctaattctttaatgtgaaatcgtatactagaaagggaaaaattatctttgagttttccgttagaaaagaaccacgaaactaatgttctgattgcgtccgattccgttgctgaattaatggatttacaccaaaaactcatataacttctagatgtagaagcattcgctaaaaaattagtagaatcaaaggatataagtagatgttccaacaagtgagcaattcccaagatttcatctatatcattctcgaatccgaaattagaaattcccaagtagatatcctttttcatccgatcgttgatgaaaatacgaactttattcggtaagacaatcatttactaaggagtaaaataggaagtaatgttcgtatgtcgttatcatcgtataaattaaaggtgtgttttttaccattaagtgacattataattttaccaatattggaattataatataggtgtatttgcgcactcgcgacggttgatgcatcggtaaatatagctgtatctaatgttctagtcggtatttcatcatttcgctgtctaataatagcgttttctctatctgtttccattacagctgcctgaagtttattggtcggataatatgtaaaataataagaaatacatacgaataacaaaaataaaataagatataataaagatgccatttagagatctaattttgtttaacttgtccaaattcctacttacagaagatgaggaatcgttggagatagtgtcttccttatgtagaggatttgaaatatcttataatgacttgataacttactttccagataggaaataccataaatatatttataaagtatttgaacatgtagatttatcggaggaattaagtatggaattccatgatacaactctgagagatttagtctatcttagattgtacaagtattccaagtgtatacggccgtgttataaattaggagataatctaaaaggcatagttgttataaaggacaggaatatttatattagggaagcaaatgatgacttgatagaatatctcctcaaggaatacactcctcagatttatacatattctaatgagcgcgtccccataactggttcaaaattaattctttgtggattttctcaagttacatttatggcgtatacaacgtcgcatataacaacaaataaaaaggtagatgttctcgtttccaaaaaatgtatagatgaactagtcgatccaataaattatcaaatacttcaaaatttatttgataaaggaagcggaacaataaacaaaatactcaggaagatattttattcggtaacaggtggccaaactccataggtagctttttctatttcggattttagaatttccaaattcaccagcgatttatcggttttggtgaaatccaaggatttattaatgtccacaaatgccatttgttttgtctgtggattgtatttgaaaatggaaacgatgtagttagatagatgcgctgcgaagtttcctattagggttccgcgcttcacgtcacccagcatacttgaatcaccatcctttaaaaaaaatgataagatatcaacatggagtatatcatactcgaattttaattcttctactgactcactgacattttcacaaatactacaatacggtttaccgaaaataatcagtacgttcttcatttatgggtatcaaaaacttaaaatcgttactgctggaaaataaatcactgacgatattagatgataatttatacaaagtatacaatggaatatttgtggatacaatgagtatttatatagccgtcgccaattgtgtcagaaacttagaagagttaactacggtattcataaaatacgtaaacggatgggtaaaaaagggagggcatgtaaccctttttatcgatagaggaagtataaaaattaaacaagacgttagagacaagagacgtaaatattctaaattaaccaaggacagaaaaatgttagaattagaaaagtgtacatccgaaatacaaaatgttaccggatttatggaagaagaaataaaggcagaaatgcaattaaaaatcgataaactcacatttcaaatatatttatctgattctgataacataaaaatatcattgaatgagatactaacacatttcaacaataatgagaatgttacattattttattgtgatgaacgagacgcagaattcgttatgtgtctcgaggctaaaacacatttctctaccacaggagaatggccgttgataataagtaccgatcaggatactatgctatttgcatctgctgataatcatcctaagatgataaaaaacttaactcaactgtttaaatttgttccctcggcagaggataactatttagcaaaattaacggcgttagtgaatggatgtgatttctttcctggactctatggggcatctataacacccaccaacttaaacaaaatacaattgtttagtgattttacaatcgataatatagtcactagtttggcaattaaaaattattatagaaagactaactctaccgtagacgtgcgtaatattgttacgtttataaacgattacgctaatttagacgatgtctactcgtatattcctccttgtcaatgcactgttcaagaatttatattttccgcattagatgaaaaatggaatgaatttaaatcatcttatttagaaagcgtgccgttaccctgccaattaatgtacgcgttagaaccacgcaaggagattgatgtttcagaagttaaaactttatcatcttatatagatttcgaaaatactaaatcagatatcgatgttataaaatctatatcctcgatcttcggatattctaacgaaaactgtaacacgatagtattcggcatctataaggataatttactactgagtataaataattcattttactttaacgatagtctgttaataaccaatactaaaagtgataatataataaatataggttactagattaaaaatggtgttccaactcgtgtgctctacatgcggtaaagatatttctcacgaacgatataaattgattatacgaaaaaaatcattaaaggatgtactcgtcagtgtaaagaacgaatgttgtaggttaaaattatctacacaaatagaacctcaacgtaacttaacagtgcaacctctattggatataaactaatatggatccggttaattttatcaagacatatgcgcctagaggttctattatttttattaattataccatgtcattaacaagtcatttgaatccatcgatagaaaaacatgtgggtatttattatggtacgttattatcggaacacttggtagttgaatctacctatagaaaaggagttcgaatagtcccattggatagtttttttgaaggatatcttagtgcaaaagtatacatgttagagaatattcaagttatgaaaatagcagctgatacgtcattaactttattgggtattccgtatggatttggtcatgatagaatgtattgttttaaattggtagctgactgttataaaaatgccggtattgatacatcgtctaaacgaatattgggcaaagatatttttctgagccaaaacttcacagacgataatagatggataaagatatatgattctaataatttaacattttggcaaattgattaccttaaagggtgagttaatatgcataactactcctccgttgttttttccctcgttctttttcttaacgttgtttgccatcactctcataatgtaaagatattctaaaatggtaaacttttgcatatcggacgcagaaattggtataaatgttgtaattgtattatttcccgtcaatggactagtcacagctccatcagttttatatcctttagagtatttctcactcgtgtctaacattctagagcattccatgatctgtttatcgttgatattggccggaaagatagattttttattttttattatattactattggcaattgtagatataacttctggtaaatatttttctaccttttcaatctcttctattttcaagccggctatatattctgctatattgttgctagtatcaataccttttctggctaagaagtcatatgtggtattcactatatcagttttaactggtagttccattagcctttccacttctgcagaataatcagaaattggttctttaccagaaaatccagctactataataggctcaccgatgatcattggcaaaatcctatattgtaccagattaatgagagcatatttcatttccaataattctgctagttcttgagacattgatttatttgatgaatctagttggttctctagatactctaccatttctgccgcatacaataacttgttagataaaatcagggttatcaaagtgtttagcgtggctagaatagtgggcttgcatgtattaaagaatgcggtagtatgagtaaaccgttttaacgaattatatagtctccagaaatctgtggcgttacatacatgagccgaatgacatcgaagattgtccaatatttttaatagctgctctttgtccattatttctatatttgactcgcaacaattgtagataccattaatcaccgattcctttttcgatgccggacaatagcacaattgtttagctttggactctatgtattcagaattaatagatatatctctcaatacagattgcactatacattttgaaactatgtcaaaaattgtagaacgacgctgttctgcagccatttaactttaaataatttacaaaaatttaaaatgagcatccgtataaaaatcgataaactgcgccaaattgtggcatatttttcagagttcagtgaagaagtgtctataaatgtagactcgacggatgagttaatgtatatttttgccgccttgggcggatctgtaaacatttgggcaattatacctctaagtgcatcagtgttttaccgaggagccgaaaatattgtgtttaatcttcctgtgtccaaggtaaaatcgtgtttgtgtagttttcacaatgatgccatcatagatatagaacctgatctggaaaataatctagtaaaactttctagttatcatgtagtaagtgtcgattgtaacaaggaactgatgcctattaggacagatactactatttgtctaagtatagatcaaaagaaatcttacgtgtttaattttcacaagtatgaagaaaaatgttgtggtagaaccgtcattcatctagaatggttgttgggctttatcaagtgtattagtcagcatcagcatctggctattatgtttaaagatgacaatattattatgaagactcctggtaatactgatgcgttttccagggaatattctatgactgaatgttctcaagaactacaaaagttttctttcaaaatagctatctcgtctctcaacaaactacgaggattcaaaaagagagtcaatgtttttgaaactagaatcgtaatggataatgacgataacattttaggaatgttgttttcggatagagttcaatcctttaagatcaacatctttatggcgtttttagattaatactttcaatgagataaatatgggtggcggagtaagtgttgagctccctaaacgggatccgcctccgggagtacccactgatgagatgttattaaacgtggataaaatgcatgacgtgatagctcccgctaagcttttagaatatgtgcatataggaccactagcaaaagataaagaggataaagtaaagaaaagatatccagagtttagattagtcaacacaggacccggtggtctttcggcattgttaagacaatcgtataatggaaccgcacccaattgctgtcgcacttttaatcgtactcattattggaagaaggatggaaagatatcagataagtatgaagagggtgcagtattagaatcgtgttggccagacgttcacgacactggaaaatgcgatgttgatttattcgactggtgtcagggggatacgttcgatagaaacatatgccatcagtggatcggttcagcctttaataggagtaatagaactgtagagggtcaacaatcgttaataaatctgtataataagatgcaaacattatgtagtaaagatgctagtgtaccaatatgcgaatcatttttgcattatttacgcgcacacaatacagaagatagcaaagagatgatcgattatattctaagacaacagtctgcggactttaaacagaaatatatgagatgtagttatcccactagagataagttagaagagtcattaaaatatgcggaacctcgagaatgttgggatccagagtgttcgaatgccaatgttaatttcttactaacacgtaattataataatttaggactttgcaatattgtacgatgtaataccagcgtgaacaacttacagatggataaaacttcctcattaagattgtcatgtggattaagcaatagtgatagattttctactgttcccgtcaatagagcaaaagtagttcaacataatattaaacactcgttcgacctaaaattgcatttgatcagtttattatctctcttggtaatatggatactaattgtagctatttaaatgggtgccgcggcaagcatacagacgacggtgaatacactcagcgaacgtatctcgtctaaattagaacaagaagcgaacgctagtgctcaaacaaaatgtgatatagaaatcggaaatttttatatccgacaaaaccatggatgtaacctcactgttaaaaatatgtgctctgcggacgcggatgctcagttggatgctgtgttatcagccgctacagaaacatatagtggattaacaccggaacaaaaagcatacgtgccagctatgtttactgctgcgttaaacattcagacgagtgtaaacactgttgttagagattttgaaaattatgtgaaacagacttgtaattctagcgcggtcgtcgataacaaattaaagatacaaaacgtaatcatagatgaatgttacggagccccaggatctccaacaaatttggaatttattaatacaggatctagcaaaggaaattgtgccattaaagcgttgatgcaattgacgactaaggccactactcaaatagcacctagacaagttgctggtacaggagttcagttttatatgattgttatcggtgttataatattggcagcgttgtttatgtactatgccaagcgtatgttgttcacatccaccaatgataaaatcaaacttattttagccaataaggaaaacgtccattggactacttacatggacacattctttagaacttctccgatggttattgctaccacggatatgcaaaactgaaaatatattgataatattttaatagattaacatggaagttatcgctgatcgtctagacgatatagtgaaacaaaatatagcggatgaaaaatttgtagattttgttatacacggtctagagcatcaatgtcctgctatacttcgaccattaattaggttgtttattgatatactattatttgttatagtaatttatatttttacggtacgtctagtaagtagaaattatcaaatgttgttggtggtgctagtcatcacattaactattttttattactttatactataatagtactagactgacttctaacaaacatctcacctgccataaataaatgcttgatattaaagtcttctatttctaacactattccatctgtggaaaataatactctgacattatcgctaattgacacatcggtgagtgatatgcctataaagtaataatcttctttgggcacatataccagtgtaccaggttctaacaacctatttactggtgctcctgtagcatactttttctttaccttgagaatatccatcgtttgcttggtcaatagcgatatgtgattttttatcaaccactcaaaaaagtaattggagtgttcatatcctctacgggctattgtctcatggccgtgtatgaaatttaagtaacacgactgtggtagatttgttctatagagccgattgccgcaaatagatagaactaccaatatgtctgtacaaatgttaaacattaattgattaacagaaaaaacaatgttcgttctgggaatagaaaccagatcaaaacaaaattcgttagaatatatgccacgtttatacatggaatataaaataactacagtttgaaaaataacagtatcatttaaacatttaacttgcggggttaatctcacaactttactgtttttgaactgttcaaaatatagcatcgatccgtgagaaatacgtttagccgcctttaatagaggaaatcccaccgcctttctggatctcaccaacgacgatagttctgaccagcaactcatttcttcatcatccacctgttttaacatataataggcaggagatagatatccgtcattgcaatattccttctcgtaggcacacaatctaatattgataaaatctccattctcttctctgcatttattatcttgtctcggtggctgattaggctgtggtcttggtttaggccttggtctatcgttgttgaatctattttggtcattaaatctttcatttcttcctggtatatttctatcacctcgtttggttggatttttgtctatattatcgtttgtaacatcggtacgggtattcatttatcacaaaaaaaacttctctaaatgagtctactgctagaaaacctcatcgaagaagataccatattttttgcaggaagtatatctgagtatgatgatttacaaatggttattgccggcgcaaaatccaaatttccaagatctatgctttctatttttaatatagtacctagaacgatgtcaaaatatgagttggagttgattcataacgaaaatatcacaggagcaatgtttaccacaatgtataatataagaaacaatttgggtctaggagatgataaactaactattgaagccattgaaaactatttcttggatcctaacaatgaagttatgcctcttattattaataatacggatatgactgccgtcattcctaaaaaaagtggtaggagaaagaataagaacatggttatcttccgtcaaggatcatcacctatcttgtgcattttcgaaactcgtaaaaagattaatatttataaagaaaatatggaatccgcgtcgactgagtatacacctatcggagacaacaaggctttgatatctaaatatgcgggaattaatgtcctgaatgtgtattctccttccacatccataagattgaatgccatttacggattcaccaataaaaataaactagagaaacttagtactaataaggaactagaatcgtatagttctagccctcttcaagaacccattaggttaaatgattttctgggactattggaatgtgttaaaaagaatattcctctaacagatattccgacaaaggattgattactataaatggagaatgttcctaatgtatactttaatcctgtgtttatagagcccacgtttaaacattctttattaagtgtttataaacacagattaatagttttatttgaagtattcgttgtattcattctaatatatgtattttttagatctgaattaaatatgttcttcatgcctaaacgaaaaatacccgatcctattgatagattacgacgtgctaatctagcgtgtgaagacgataaattaatgatctatggattaccatggatgacaactcaaacatctgcgttatcaataaatagtaaaccgatagtgtataaagattgtgcaaagcttttgcgatcaataaatggatcacaaccagtatctcttaacgatgttcttcgcagatgatgattcattttttaagtatttggctagtcaagatgatgaatcttcattatctgatatattgcaaatcactcaatatctagactttctgttattattattgatccaatcaaaaaataaattagaagctgtgggtcattgttatgaatctctttcagaggaatacagacaattgacaaaattcacagactttcaagattttaaaaaactgtttaacaaggtccctattgttacagatggaagggtcaaacttaataaaggatatttgttcgactttgtgattagtttgatgcgattcaaaaaagaatcctctctagctaccaccgcaatagatcctgttagatacatagatcctcgtcgcaatatcgcattttctaacgtgatggatatattaaagtcgaataaagtgaacaataattaattctttattgtcatcatgaacggcggacatattcagttgataatcggccccatgttttcaggtaaaagtacagaattaattagacgagttagacgttatcaaatagctcaatataaatgcgtgactataaaatattctaacgataatagatacggaacgggactatggacgcatgataagaataattttgaagcattggaagcaactaaactatgtgatgtcttggaatcaattacagatttctccgtgataggtatcgatgaaggacagttctttccagacattgtttaattctgtgagcgtatggcaaacggtaccgagctcttttttttttttttttttttggcatataaataagtcgactccctatcagtgatagagaatgttcttggctgttttgtattgccttctgtggagtttccagatctctgatggccattttcctcgagcctgtgcctcctctaagaacttgttggcaaaagaatgctgcccaccatggatgggtgatgggagtccctgcggccagctttcaggcagaggttcctgccaggatatccttctgtccagtgcaccatctggacctcagttccccttcaaaggggtggatgaccgtgagtcctggccctctgtgttttataataggacctgccagtgctcaggcaacttcatgggtttcaactgcggaaactgtaagtttggatttgggggcccaaattgtacagagaagcgagtcttgattagaagaaacatttttgatttgagtgtctccgaaaagaataagttcttttcttacctcactttagcaaaacatactatcagctcagtctatgtcatccccacaggcacctatggccaaatgaacaatgggtcaacacccatgtttaatgatatcaacatctacgacctctttgtatggatgcattactatgtgtcaagggacacactgcttgggggctctgaaatatggagggacattgattttgcccatgaagcaccagggtttctgccttggcacagacttttcttgttattgtgggaacaagaaattcgagaactaactggggatgagaacttcactgttccatactgggattggagagatgcagaaaactgtgacatttgcacagatgagtacttgggaggtcgtcaccctgaaaatcctaacttactcagcccagcatccttcttctcctcctggcagatcatttgtagcagatcagaagagtataatagccatcaggttttatgcgatggaacacctgagggaccactattacgtaatcctggaaaccatgacaaagccaaaacccccaggctcccatcttcagcagatgtggaattttgtctgagtttgacccagtatgaatctggatcaatggatagaactgccaatttcagctttagaaacacactggaaggatttgccagtccactcacagggatagcagatccttctcaaagtagcatgcacaatgccttacatatctttatgaatggaacaatgtcccaagtacagggatcggccaacgatcccatttttcttcttcaccatgcttttgtggacagtatttttgaacaatggctgcgaaggcaccgccctcttttggaagtttacccagaagccaatgcacctatcggccataacagagactcttacatggttcctttcataccgctctatagaaatggtgatttcttcataacatccaaggatctgggatatgactacagctacctccaagagtcagatccaggcttttacagaaattatattgagccttacttggaacaagccagtcgtatctggccatggcttcttggggcagcactggtgggagctgttattgctgcagctctctctgggcttagcagtaggctatgccttcagaagaagaagaagaagaagcaaccccaggaggaaaggcagccactcctcatggacaaagacgactaccacagcttgctgtatcagagccatctgtgattaattaatttttatcgatctaattcaacaatgtctggagagctcggatccttctgtgagcgtatggcaaacgaaggaaaaatagttatagtagccgcactcgatgggacatttcaacgtaaaccgtttaataatattttgaatcttattccattatctgaaatggtggtaaaactaactgctgtgtgtatgaaatgctttaaggaggcttccttttctaaacgattgggtgaggaaaccgagatagaaataataggaggtaatgatatgtatcaatcggtgtgtagaaagtgttacatcgactcataatattatattttttatctaaaaaactaaaaataaacattgattaaattttaatataatacttaaaaatggatgttgtgtcgttagataaaccgtttatgtattttgaggaaattgataatgagttagattacgaaccagaaagtgcaaatgaggtcgcaaaaaaactgccgtatcaaggacagttaaaactattactaggagaattattttttcttagtaagttacagcgacacggtatattagatggtgccaccgtagtgtatataggatctgctcccggtacacatatacgttatttgagagatcatttctataatttaggagtgatcatcaaatggatgctaattgacggccgccatcatgatcctattttaaatggattgcgtgatgtgactctagtgactcggttcgttgatgaggaatatctacgatccatcaaaaaacaactgcatccttctaagattattttaatttctgatgtgagatccaaacgaggaggaaatgaacctagtacggcggatttactaagtaattacgctctacaaaatgtcatgattagtattttaaaccccgtggcgtctagtcttaaatggagatgcccgtttccagatcaatggatcaaggacttttatatcccacacggtaataaaatgttacaaccttttgctccttcatattcagctgaaatgagattattaagtatttataccggtgagaacatgagactgactcgagttaccaaattagacgctgtaaattatgaaaaaaagatgtactaccttaataagatcgtccgtaacaaagtagttgttaactttgattatcctaatcaggaatatgactattttcacatgtactttatgctgaggaccgtgtactgcaataaaacatttcctactactaaagcaaaggtactatttctacaacaatctatatttcgtttcttaaatattccaacaacatcaactgaaaaagttagtcatgaaccaatacaacgtaaaatatctagcaaaaattctatgtctaaaaacagaaatagcaagagatccgtacgcggtaataaatagaaacgtactactgagatatactaccgatatagagtataatgatttagttactttaataaccgttagacataaaattgattctatgaaaactgtgtttcaggtatttaacgaatcatccataaattatactccggttgatgatgattatggagaaccaatcattataacatcgtatcttcaaaaaggtcataacaagtttcctgtaaattttctatacatagatgtggtaatatctgacttatttcctagctttgttagactagatactacagaaactaatatagttaatagtgtactacaaacaggcgatggtaaaaagactcttcgtcttcccaaaatgttagagacggaaatagttgtcaagattctctatcgccctaatataccattaaaaattgttagatttttccgcaataacatggtaactggagtagagatagccgatagatctgttatttcagtcgctgattaatcaattagtagagatgagataagaacattataataatcaataatatatcttatatcttatatcttatatcttatatcttgtttagaaaaatgctaatattaaaatagctaacgctagtaatccaatcggaagccatttgatatctataatagggtatctaatttcctgatttaaatagcggacagctatattctcggtagctactcgtttggaatcacaaacattatttacatctaatttactatctgtaatggaaacgtttcccaatgaaatggtacaatccgatacattgcattttgttatatttttttttaaagaggctggtaacaacgcatcgcttcgtttacatggctcgtaccaacaataatagggtaatcttgtatctattcctatccgtactatgcttttatcaggataaatacatttacatcgtatatcgtctttgttagcatcacagaatgcataaatttgttcgtccgtcatgataaaaatttaaagtgtaaatataactattatttttatagttgtaataaaaagggaaatttgattgtatactttcggttctttaaaagaaactgacttgataaaaatggctgtaatctctaaggttacgtatagtctatatgatcaaaaagagattaatgctacagatattatcattagtcatgttaaaaatgacgacgatatcggtaccgttaaagatggtagactaggtgctatggatggggcattatgtaagacttgtgggaaaacggaattggaatgtttcggtcactggggtaaagtaagtatttataaaactcatatagttaagcctgaatttatttcagaaattattcgtttactgaatcatatatgtattcactgcggattattgcgttcacgagaaccgtattccgacgatattaacctaaaagagttatcgggacacgctcttaggagattaaaggataaaatattatccaagaaaaagtcatgttggaacagtgaatgtatgcaaccgtatcaaaaaattactttttcaaagaaaaaggtttgtttcgtcaacaagttggatgatattaacgttcctaattctctcatctatcaaaagttaatttctattcatgaaaagttttggccattattagaaattcatcaatatccagctaacttattttatacagactactttcccatccctccgttgattattagaccggctattagtttttggatagatagtatacccaaagagaccaatgaattaacttacttattaggtatgatcgttaagaattgtaacttgaatgctgatgaacaggttatccagaaggcggtaatagaatacgatgatattaaaattatttctaataacactaccagtatcaatttatcatatattacatccggcaaaaataatatgattagaagttatatcgtcgcccgacgaaaagatcagaccgctagatctgtaattggtcccagtacatctatcaccgttaatgaggtaggaatgcccgcatatattagaaatacacttacagaaaagatatttgttaatgcctttacagtggataaagttaaacaactattagcgtcaaaccaagttaaattttactttaataaacgattaaaccaattaacaagaatacgccaaggaaagtttattaaaaataaaatacatttattgcctggtgattgggtagaagtagctgttcaagaatatacaagtattatttttggaagacagccgtctctacatagatacaacgtcatcgcttcatctatcagagctaccgaaggagatactatcaaaatatctcccggaattgccaactctcaaaatgctgatttcgacggggatgaggaatggatgatattagaacaaaatcctaaagctgtaattgaacaaagtattcttatgtatccgacgacgttactcaaacacgatattcatggagcccccgtttatggatctattcaagatgaaatcgtagcagcgtattcattgtttaggatacaagatctttgtttagatgaagtattgaacatcttggggaaatatggaagagagttcgatcctaaaggtaaatgtaaattcagcggtaaagatatctatacttacttgataggtgaaaagattaattatccgggtctcttaaaggatggtgaaattattgcaaacgacgtagatagtaattttgttgtggctatgaggcatctgtcattggctggactcttatccgatcataagtcgaacgtggaaggtatcaactttattatcaagtcatcttatgtttttaagagatatctatctatttacggttttggggtgacattcaaagatctgagaccaaattcgacgttcactaataaattggaggccatcaacgtagaaaaaatagaacttatcaaagaagcatacgccaaatatctcaacgatgtaagagacgggaaaatagttccattatctaaagctttagaggcggactatgtggaatccatgttatccaacttgacaaatcttaatatccgagagatagaagaacatatgagacaaacgctgatagatgatccagataataacctcctgaaaatggccaaagcgggttataaagtaaatcccacagaactaatgtatattctaggtacgtatggacaacaaaggattgatggtgaaccagcagagactcgagtattgggtagagttttaccttactatcttccagactctaaggatccagaaggaagaggttacattcttaattctttaacaaaaggattaacgggttctcaatattacttttcgatgctggttgccagatctcaatctactgatatcgtctgtgaaacatcacgtaccggaacactggctagaaaaatcattaaaaagatggaggatatggtggtcgacggatacggacaagtagttataggtaatacgctcatcaagtacgccgccaattataccaaaattctaggctcagtatgtaaacctgtagatcttatctatccagatgagtccatgacttggtatttggaaattagtgctctgtggaataaaataaaacagggattcgtttactctcagaaacagaaacttgcaaagaagacattggcgccgtttaatttcctagtattcgtcaaacccaccactgaggataatgctattaaggttaaggatctgtacgatatgattcataacgtcattgatgatgtgagagagaaatacttctttacggtatctaatatagattttatggagtatatattcttgacgcatcttaatccttctagaattagaattacaaaagaaacggctatcactatctttgaaaagttctatgaaaaactcaattatactctaggtggtggaactcctattggaattatttctgcacaggtattgtctgagaagtttacacaacaagccctgtccagttttcacactactgaaaaaagtggtgccgtcaaacaaaaacttggtttcaacgagtttaataacttgactaatttgagtaagaataagaccgaaattatcactctggtatccgatgatatctctaaacttcaatctgttaagattaatttcgaatttgtatgtttgggagaattaaatccaaacatcactcttcgaaaagaaacagataaatatgtagtagatataatagtcaatagattatacatcaagagagcagaaataaccgaattagtcgtcgaatatatgattgaacgatttatctcctttagcgtcattgtaaaggaatggggtatggagacattcattgaggacgaggataatattagatttactgtctacctaaatttcgttgaaccggaagaattgaatcttagtaagtttatgatggttcttccgggggcagccaacaagggaaagattagtaaattcaagattcctatctctgattatacgggatatgacgacttcaatcaaacaaaaaagctcaataagatgactgtagaactcatgaatctaaaagaattgggttctttcgatttggaaaacgtcaacgtgtatcctggagtatggaatacatacgatatcttcggtatcgaggccgctcgtgaatacttgtgcgaagccatgttaaacacctatggagaagggttcgattatctgtatcagccttgtgatcttctcgctagtttactatgtgctagttacgaaccagaatcagtgaataaattcaagttcggcgcagctagtactcttaagagagctacgttcggagacaataaagcattgttaaacgcggctcttcataaaaagtcagaacctattaacgataatagtagctgccacttttttagcaaggtccctaatataggaactggatattacaaatactttatcgacttgggtcttctcatgagaatggaaaggaaactatctgataagatatcttctcaaaagatcaaggaaatggaagaaacagaagacttttaattcttatcaataacatatttttctatgatctgtcttttaaacgatggattttccacaaatgcgcctctcaagtccctcatagaatgatacacgtataaaaaatatagcataggcaatgactccttatttttagacattagatatgccaaaatcatagccccgcttctatttactcccgcagcacaatgaaccaacacgggctcgtttcgttgatcacatttagataaaaaggcggttacgtcgtcaaaatatttactaatatcggtagttgtatcatctaccaacggtatatgaataatattaatattagagttaggtaatgtatatttatccatcgtcaaatttaaaacatatttgaacttaacttcagatgatggtgcatccatagcatttttataatttcccaaatacacattattggttacccttgtcattatagtgggagatttggctttgtgcatatctccagttgaacgtagtagtaagtatttatacaaacttttcttatccatttataacgtacaaatggataaaactactttatcggtaaacgcgtgtaatttagaatacgttagagaaaaggctatagtaggcgtacaagcagccaaaacatcaacacttatattctttgttattatattggcaattagtgcgctattactctggtttcagacgtctgataatccagtctttaatgaattaacgagatatatgcgaattaaaaatacggttaacgattggaaatcattaacggatagcaaaacaaaattagaaagtgatagaggtagacttctagccgctggtaaggatgatatatttgaattcaaatgtgtggatttcggcgcctattttatagctatgcgattggataagaaaacatatctgccgcaagctattaggcgaggtactggagacgcgtggatggttaaaaaggcggcaaaggtcgatccatctgctcaacaattttgtcagtatttgataaaacacaagtctaataatgttattacttgtggtaatgagatgttaaatgaattaggttatagcggttattttatgtcaccgcattggtgttccgattttagtaatatggaatagtgttagataaatgcggtaacgaatgttcctgtaaggaaccataacagcttagatttaacgttaaagatgagcataaacataataaacaaaattacaatcaaacttataacattaatatcaaacaatccaaaaaatgaaatcagtggagtagtaaacgcgtacataactcctggataacgtttagcagctgccgttcctattctagaccaaaaattcggtttcatgttttcgaaacggtattctgcaacaagtcgaggatcgtgttctacatatttggcggcattatccagtatctgcctattgatcttcatttcgttttcgattctggctatttcaaaataaaatcccgatgatagacctccagactttataatttcatctacgatgttcagcgccgtagtaactctaataatataggctgataagctaacatcataccctcctgtatatgtgaatatggcatgatttttgtccattacaagctcggttttaactttattgcctgtaataatttctctcatctgtaggatatctatttttttgtcatgcattgccttcaagacgggacgaagaaacgtaatatcctcaataacgttatcgttttctacaataactacatattctacctttttattttctaactcggtaaaaaaattagaatcccatagggctaaatgtctagcgatatttcttttcgtttcctctgtacacatagtgttacaaaaccctgaaaagaagtgagtatacttgtcatcatttctaatgtttcctccagtccactgtataaacgcataatccttgtaatgatctggatcatccttgactaccacaacatttcttttttctggcataacttcgttgtcctttacatcatcgaacttctgatcattaatatgctcatgaacattaggaaatgtttctgatggaggtctatcaataactggcacaacaataacaggagttttcaccgccgccatttagttattgaaattaatcatatacaactctttaatacgagttatattttcgtctatccattgtttcacattgacatatttcgacaaaaagatataaaatgcgtattccaatgcttctctgtttaatgaattactaaaatatacaaacacgtcactgtctggcaataaatgatatcttagaatattgtaacaatttattttgtattgcacatgttcgtgatctatgagttcttcttcgaatggcataggatctccgaatctgaaaacgtataaataggagttagaataataatatttgagagtattggtaatatataaactctttagcggtataattagtttttttctctcaatttctatttttagatgtgatggaaaaatgactaattttgtagcattagtatcatgaactctaatcaaaatcttaatatcttcgtcacacgttagctctttgaagtttttaagagatgcatcagttggttctacagatggagtaggtgcaacaattttttgttctacacatgtatgtactggagccattgttttaactataatggtgcttgtatcgaaaaactttaatgcagatagcggaagctcttcgccgcgactttctacgtcgtaattgggttctaacgccgatctctgaatggatactagttttctaagttctaatgtgattctctgaaaatgtaaatccaattcctccggcattatagatgtgtatacatcggtaaataaaactatagtatccaacgatcccttctcgcaaattctagtcttaaccaaaaaatcgtatataaccacggagatggcgtatttaagagtggattcttctaccgttttgttcttggatgtcatataggaaactataaagtccgcactactgttaagaatgattactaacgcaactatatagtttaaattaagcattttggaaacataaaataactctgtagacgatacttgactttcgaataagtttgcagacaaacgaagaaagaacagacctctcttaatttcagaagaaaactttttttcgtattcctgacgtctagagtttatatcaataagaaagttaagaattagtcggttaatgttgtatttcattacccaagtttgagatttcataatattatcaaaagacatgataatattaaagataaagcgctgactatgaacgaaatagctatatggttcgctcaagaatatagtcttgttaaacgtggaaacgataactgtatttttaatcacgtcagcggcatctaaattaaatataggtatatttattccacacactctacaatatgccacaccatcttcataataaataaattcgttagcaaaattattaattttagtgaaatagttagcgtcaactttcatagcttccttcaatctaatttgatgctcacacggtgcgaattccactctaacatcccttttccatgcctcaggttcatcgatctctataatatctagttttttgcgtttcacaaacacaggctcgtctctcgcgatgagatctgtatagtaactatgtaaatgataactagatagaaagatgtagctatatagatgacgatcctttaagagaggtataataactttaccccaatcagatagactgttgttatggtcttcggaaaaagaatttttataaatttttccagtattttccaaatatacgtacttaacatctaaaaaatccttaatgataataggaatggataatccgtctattttataaagaaatacatatcgcacattatacttttttttggaaatgggaataccgatgtgtctacataaatatgcaaagtctaaatattttttagagaatcttagttggtccaaattcttttccaagtacggtaatagatttttcatattgaacggtatcttcttaatctctggttctagttccgcattaaatgatgaaactaagtcactatttttataactaacgattacatcacctctaacatcatcatttaccagaatactgatcttcttttgtcgtaaatacatgtctaatgtgttaaaaaaaagatcatacaagttatacgtcatttcatctgtggtattcttgtcattgaaggataaactcgtactaatctcttctttaacagcctgttcaaatttatatcctatatacgaaaaaatagcaaccagtgtttgatcatccgcgtcaatattctgttctatcgtagtgtataacaatcgtatatcttcttctgtgatagtcgatacgttataaaggttgataacgaaaatatttttatttcgtgaaataaagtcatcgtaggattttggacttatattcgcgtctagtagatatgcttttatttttggaatgatctcaattagaatagtctctttagagtccatttaaagttacaaacaactaggaaattggtttatgatgtataatttttttagtttttatagattctttattctatacttaaaaaatgaaaataaatacaaaggttcttgagggttgtgttaaattgaaagcgagaaataatcataaattatttcattatcgcgatatccgttaagtttgtatcgtaatggcgtggtcaattacgaataaagcggatactagtagcttcacaaagatggctgaaatcagagctcatctaaaaaatagcgctgaaaataaagataaaaacgaggatattttcccggaagatgtaataattccatctactaagcccaaaaccaaacgagccactactcctcgtaaaccagcggctactaaaagatcaaccaaaaaggaggaagtggaagaagaagtagttatagaggaatatcatcaaacaactgaaaaaaattctccatctcctggagtcagcgacattgtagaaagcgtggccgctgtagagctcgatgatagcgacggggatgatgaacctatggtacaagttgaagctggtaaagtaaatcatagtgctagaagcgatctctctgacctaaaggtggctaccgacaatatcgttaaagatcttaagaaaattattactagaatctctgcagtatcgacggttctagaggatgttcaagcagctggtatctctagacaatttacttctatgactaaagctattacaacactatctgatctagtcaccgagggaaaatctaaagttgttcgtaaaaaagttaaaacttgtaagaagtaaatgcgtgcacttttttataaagatggtaaactctttaccgataataattttttaaatcctgtatcagacgataatccagcgtatgaggttttgcaacatgttaaaattcctactcatttaacagatgtagtagtatatgaacaaacgtgggaggaggcgttaactagattaatttttgtgggaagtgattcaaaaggacgtagacaatacttttacggaaaaatgcatgtacagaatcgcaacgctaaaagagatcgtatttttgttagagtatataacgttatgaaacgaattaattgttttataaacaaaaatataaagaaatcgtccacagattccaattatcagttggcggtttttatgttaatggaaactatgttttttattagatttggtaaaatgaaatatcttaaggagaatgaaacagtagggttattaacactaaaaaataaacacatagaaataagtcccgatgaaatagttatcaagtttgtaggaaaggacaaagtttcacatgaatttgttgttcataagtctaatagactatataaaccgctattgaaactgacggatgattctagtcccgaagaatttctgttcaacaaactaagtgaacgaaaggtatacgaatgtatcaaacagtttggtattagaatcaaggatctccgaacgtatggagtcaattatacgtttttatataatttttggacaaatgtaaagtccatatctcctcttccgtcaccaaaaaagttaatagcattaactatcaaacaaactgctgaagtggtaggtcatactccatcaatttcaaaaagagcttatatggcaacgactattttagaaatggtaaaggataaaaattttttagatgtagtatctaaaactacgttcgatgaattcctatctatagtcgtagatcacgttaaatcatctacggatggatgatatagatctttacacaaataattacaagaccgataaatggaaatggataagcgtatgaaatctctcgcaatgacagctttcttcggagagctaagcacattagatattatggcattgataatgtctatatttaaacgccatccaaacaataccattttttcagtggataaggatggtcagtttatgattgatttcgaatacgataattataaggcttctcaatatttggatctgaccctcactccgatatctggagatgaatgcaagactcacgcatcgagtatagccgaacaattggcgtgtgcggatattattaaagaggatattagcgaatatatcaaaactactccccgtcttaaacgatttataaaaaaataccgcaatagatcagatactcgtatcagtcgagatacagaaaagcttaaaatagctctagctaaaggcatagattacgaatatataaaagacgcttgttaataagtaaatgaaaaaaaactagtcgtttataataaaacacgatatggatgccaacgtagtatcattttctactattgcgacgtatatagacgctttagcgaagaatgcttcggaattagaacagaggtctaccgcatacgaaataaataatgaattggaactagtatttattaagccgccattgattactttgacaaatgtagtgaatatctctacgattcaggaatcgtttattcgatttaccgttactaataaggaaggtgttaaaattagaactaagattccattatctaaggtacatggtctagatgtaaaaaatgtacagttagtagatgctatagataacatagtttgggaaaagaaatcattagtgacggaaaatcgtcttcacaaagaatgcttgttgagactatcgacagaggaacgtcatatatttttggattacaagaaatatggatcctctatccgactagaattagtcaatcttattcaagcaaaaacaaaaaactttacgatagactttaagctaaaatattttctaggatccggtgcccagtctaaaagttctttgttgcacgctattaatcatccaaagtcaaggcctaatacatctctggaaatagaattcacacctagagacaatgaaacagttccatatgatgaactaataaaggaattgacgactctctcgcgtcatatatttatggcttctccagagaatgtaattctttctccgcctattaacgcgcctataaaaacctttatgttgcctaaacaagatatagtaggtttggatctggaaaatctatatgccgtaactaagactgacggcattcctataactatcagagttacatcaaacgggttgtattgttattttacacatcttggttatattattagatatcctgttaagagaataatagattccgaagtagtagtctttggtgaggcagttaaggataagaactggaccgtatatctcattaagctaatagagcctgtgaatgcaatcaatgatagactagaagaaagtaagtatgttgaatctaaactagtggatatttgtgatcggatagtattcaagtcaaagaaatacgaaggtccgtttactacaactagtgaagtcgtcgatatgttatctacatatttaccaaagcaaccagaaggtgttattctgttctattcaaagggacctaaatctaacattgattttaaaattaaaaaggaaaatactatagaccaaactgcaaatgtagtatttaggtacatgtccagtgaaccaattatctttggagaatcgtctatctttgtagagtataagaaatttagcaacgataaaggctttcctaaagaatatggttctggtaagattgtgttatataacggcgttaattatctaaataatatctattgtttggaatatattaatacacataatgaagtgggtattaagtccgtggttgtacctattaagtttatagcagaattcttagttaatggagaaatacttaaacctagaattgataaaaccatgaaatatattaactcagaagattattatggaaatcaacataatatcatagtcgaacatttaagagatcaaagcatcaaaataggagatatctttaacgaggataaactatcggatgtgggacatcaatacgccaataatgataaatttagattaaatccagaagttagttattttacgaataaacgaactagaggaccgttgggaattttatcaaactacgtcaagactcttcttatttctatgtattgttccaaaacatttttagacgattccaacaaacgaaaggtattggcgattgattttggaaacggtgctgacctggaaaaatacttttatggagagattgcgttattggtagcgacggatccggatgctgatgctatagctagaggaaatgaaagatacaacaaattaaactctggaattaaaaccaagtactacaaatttgactacattcaggaaactattcgatccgatacatttgtctctagtgtcagagaagtattctattttggaaagtttaatatcatcgactggcagtttgctatccattattcttttcatccgagacattatgctaccgtcatgaataacttatccgaactaactgcttctggaggcaaggtattaatcactaccatggacggagacaaattatcaaaattaacagataaaaagacttttataattcataagaatttacctagtagcgaaaactatatgtctgtagaaaaaatagctgatgatagaatagtggtatataatccatcaacaatgtctactccaatgactgaatacattatcaaaaagaacgatatagtcagagtgtttaacgaatacggatttgttcttgtagataacgttgatttcgctacaattatagaacgaagtaaaaagtttattaatggcgcatctacaatggaagatagaccgtctacaaaaaactttttcgaactaaatagaggagccattaaatgtgaaggtttagatgtcgaagacttacttagttactatgttgtttatgtcttttctaagcggtaaataataatatggtatgggttctgatctcccagttctaaatgcattaaataattccaatagagcgatttttgttcctataggaccttccaactgtggatactctgtattgttaatagatatattaatacttttgtcgggtaacagaggttctacgtcttctaaaaataaaagttttataacatctggcctgttcataaataaaaacttggcgattctatatatactcttattatcaaatctagccattgtcttatagatgtgagctactgtaggtgtaccatttgattttctttctaatactatatatttctctcgaagaagttcttgcacatcatctgggaataaaatactactgttgagtaaatcagttattttttttatatcgatattgatggacatttttatagttaaggataataagtatcccaaagtcgataacgacgataacgaagtatttatacttttaggaaatcacaatgactttatcagattaaaattaacaaaattaaaggagcatgtatttttttctgaatatattgtgactccagatacatatggatctttatgcgtcgaattaaatgggtctagttttcagcacggcggtagatatatagaggtggaggaatttatagatgctggaagacaagttagatggtgttctacatccaatcatatatctaaagatatacccgaagatatgcacactgataaatttgtcatttatgatatttatacgtttgattcgttcaagaataaacgattggtattcgtacaggtacctccgtcgttaggagatgatagtcatttgactaatccgttattgtcaccgtattatcgtaattcagtagccagacaaatggtcaatgatatgatttttaatcaagattcatttttaaaatatttattagaacatctgattagaagccactatagagtttctaaacatataacaatagttagatacaaggataccgaagaattaaatctaacgagaatatgttataatagagataagtttaaggcgtttgtattcgcttggtttaacggcgtttcggaaaatgaaaaggtactagatacgtataaaaaggtatctaatttgatataatgaattcagtgactgtatcacacgcgccatatactattacttatcacgatgattgggaaccagtaatgagtcaattggtagagttttataacgaagtagccagttggctgctacgagacgagacgtcgcctattcctgataagttctttatacagttgaaacaaccgcttagaaataaacgagtatgtgtgtgtggtatagatccgtatccgaaagatggaactggtgtaccgttcgaatcaccaaattttacaaaaaaatcaattaaggagatagcttcatctatatctagattaaccggagtaattgattataaaggttataaccttaatataatagacggggttataccctggaattattacttaagttgtaaattaggagaaacaaaaagtcacgcgatttactgggataagatttccaagttactgctgcagcatataactaaacacgttagtgttctttattgtttgggtaaaacagatttctcgaatatacgggccaagttagaatccccggtaactaccatagtcggatatcatccagcggctagagaccgccaattcgagaaagatagatcatttgaaattatcaacgttttactggaattagacaacaaggcacctataaattgggctcaagggtttatttattaatgctttagtgaaattttaacttgtgttctaaatggatgcggctattagaggtaatgatgttatctttgttcttaagactataggtgtcccgtcagcgtgcagacaaaatgaagatccaagatttgtagaagcatttaaatgcgacgagttagaaagatatattgagaataatccagaatgtacactattcgaaagtcttagggatgaggaagcatactctatagtcagaattttcatggatgtagatttagacgcgtgtctagacgaaatagattatttaacggccattcaagattttattatcgaggtgtcaaactgtgtagctagattcgcgtttacagaatgcggcgccattcatgaaaatgtaataaaatccatgagatctaatttttcattgactaagtctacaaatagagataaaacaagttttcatattatctttttagatacgtataccactatggatacattgatagctatgaaacgaacactattagaattaagtagatcatctgaaaatccactaaccagatcgatagacactgccgtatataggagaaaaacaactcttcgggttgtaggtactaggaaaaatccaaattgcgacactattcatgtaatgcaaccaccgcatgataatatagaagattacctattcacttacgtggatatgaacaacaatagttattacttttctctacaacaacgattggaggatttagttcctgataagttatgggaaccagggtttatttcattcgaagacgctataaaaagagtttcaaaaatattcattaattctataataaactttaatgatctcgatgaaaataattttacaacggtaccactggtcatagattacgtaacaccttgtgcattatgtaaaaaacgatcgcataaacatccgcatcaactatcgttggaaaatggtgctattagaatttacaaaactggtaatccacatagttgtaaagttaaaattgttccgttggatggtaataaactgtttaatattgcacaaagaattttagacactaactctgttttattaaccgaacgaggagaccatatagtttggattaataattcatggaaatttaacagcgaagaacccttgataacaaaactaattttgtcaataagacatcaactacctaaggaatattcaagcgaattactctgtccaagaaaacgaaagactgtagaagctaacatacgagacatgttagtagattcagtggagaccgatacctatccggataaacttccgtttaaaaatggtgtattggacctggtagacggaatgttttactctggagatgatgctaaaaaatatacgtgtactgtatcaaccggatttaaatttgacgatacaaagttcgtcgaagacagtccagaaatggaagagttaatgaatatcattaacgatatccaaccattaacggatgaaaataagaaaaatagagagctatatgaaaaaacattatctagttgtttatgcggtgctaccaaaggatgtttaacattcttttttggagaaactgcaactggaaagtcgacaaccaaacgtttgttaaagtctgctatcggtgacctgtttgttgagacgggtcaaacaattttaacagatgtattggataaaggacctaatccatttatcgctaacatgcatttgaaaagatctgtattctgtagcgaactacctgattttgcctgtagtggatcaaagaaaattagatctgacaatattaaaaagttgacagaaccttgtgtcattggaagaccgtgtttctccaataaaattaataatagaaaccatgcgacaatcattatcgatactaattacaaacctgtttttgataggatagataacgcattaatgagaagaattgccgtcgtgcgattcagaacacacttttctcaaccttctggtagagaggctgctgaaaataatgacgcgtacgataaagtcaaactattagacgaggggttagatggtaaaatacaaaataatatatatagatttgcatttctatacttgttggtgaaatggtacaaaaaatatcatgttcctattatgaaactatatcctacacccgaagagattcctgactttgcattctatctcaaaataggtactctgttggtatctagctctgtaaagcatattccattaatgacggacctctccaaaaagggatatatattgtacgataatgtggtcactcttccgttgactactttccaacagaaaatatccaagtattttaattctagactatttggacacgatatagagagcttcatcaatagacataagaaatttgccaatgttagtgatgaatatctgcaatatatattcatagaggatatttcatctccgtaaatatatgctcatatatttatagaagatatcacatatctaaatgaataccggaatcatagatttatttgataatcatgttgatagtataccaactatattacctcatcagttagctactctagattatctagttagaactatcatagatgagaacagaagcgtgttattgttccatattatgggatcaggtaaaacaataatcgctttgttgttcgccttggtagcttccagatttaaaaaggtttacattctagtgccgaacatcaacatcttaaaaattttcaattataatatgggtgtagctatgaacttgtttaatgacgaattcatagctgagaatatctttattcattccacaacaagtttttattctcttaattataacgataacgtcattaattataacggattatctcgctacaataactctatttttatcgttgatgaggcacataatatctttgggaataatactggagaacttatgaccgtgataaaaaataaaaacaagattccttttttactattgtctggatctcccattactaacacacctaatactctgggtcatattatagatttaatgtccgaagagacgatagattttggtgaaattattagtcgtggtaagaaagtaattcagacacttcttaacgaacgcggtgtgaatgtacttaaggatttgcttaaaggaagaatatcatattacgaaatgcctgataaagatctaccaacgataagatatcacggacgtaagtttctagatactagagtagtatattgtcacatgtctaaacttcaagagagagattatatgattactagacgacagctatgttatcatgaaatgtttgataaaaatatgtataacgtgtcaatggcagtattgggacaacttaatctgatgaataatttagatactttatttcaggaacaggataaggaattgtacccaaatctgaaaataaataatggcgtgttatacggagaagaattggtaacgttaaacattagttccaaatttaaatactttattaatcggatacagacactcaacggaaaacattttatatacttttctaattctacatatggcggattggtaattaaatatatcatgctcagtaatggatattctgaatataatggttctcagggaactaatccacatatgataaacggcaaaccaaaaacatttgctatcgttactagtaaaatgaaatcgtctttagaggatctattagatgtgtataattctcctgaaaacgatgatggtagtcaattgatgtttttgttttcatcaaacattatgtccgaatcctatactctaaaagaggtaaggcatatttggtttatgactatcccagatactttttctcaatacaaccaaattcttggacgatctattagaaaattctcttacgccgatatttctgaaccagttaatgtatatcttttagccgccgtatattccgatttcaatgacgaagtgacgtcattaaacgattacacacaggatgaattaattaatgttttaccatttgacatcaaaaagctgttgtatctaaaatttaagacgaaagaaacgaatagaatatactctattcttcaagagatgtctgaaacgtattctcttccaccacatccatcaattgtaaaagttttattgggagaattggtcagacaatttttttataataattctcgtattaagtataacgataccaagttacttaaaatggttacatcagttataaaaaataaagaagacgctaggaattacatagatgatattgtaaacggtcacttctttgtatcgaataaagtatttgataaatctcttttatacaaatacgaaaacgatattattacagtaccgtttagactttcctacgaaccatttgtttggggagttaactttcgtaaagaatataacgtggtatcttctccataaaactgatgagatatataaagaaataaatgtcgagctttgttaccaatggatacctttccgttacattggaaccacacgagctgacgttagacataaaaactaatattaggaatgccgtatataagacgtatctccatagagaaattagtggtaaaatggccaagaaaatagaaattcgtgaagacgtggaattacctctcggcgaaatagttaataattctgtagttataaacgttccgtgtgtaataacctacgcgtattatcacgttggggatatagtcagaggaacattaaacatcgaagatgaatcaaatgtaactattcaatgtggagatttaatctgtaaactaagtagagattcgggtactgtatcatttagcgattcaaagtactgcttttttcgaaatggtaatgcgtatgacaatggcagcgaagtcactgccgttctaatggaggctcaacaaggtatcgaatctagttttgtttttctcgcgaatatcgtcgactcataaaaaagagaatagcggtaagtataaacacgaatactatggcaataattgcgaatgttttattctcttcgatatatttttgataatatgaaaaacatgtctctctcaaatcggacaaccatctcataaaatagttctcgcgcgctggagaggtagttgccgctcgtataatctctccagaataatatacttgcgtgtcgtcgttcaatttatacggatttctatagttctctgttatataatgcggtttgccctcatgattagacgacgacaatagtgttctaaatttagatagttgatcagaatgaatgtttattggcgttggaaaaattatccatacagcgtctgcagagtggttgatagttgttcctagatatgtaaaataatccaacttactaggcagcaaattgtctagataaaatactgaatcaaacggtgcagacgtattggcggatctaatggaatccaattgattaactatcttttgaaaatatacatttttatgatccaatacttgtaagaatatagaaataatgataagtccatcatcgtgtttttttgcctcttcataagaactatattttttcttattccaatgaacaagattaatctctccagagtatttgtacacatctatcaagtgattggatccataatcgtcttcctttccccaatatatatgtagtgatgataacacatattcattggggagaaaccctccacttatatatcctcctttaaaattaatccttactagttttccagtgttctggatagtggttggtttcgactcattataatgtatgtctaacggcttcaatcgcgcgttagaaattgcttttttagtttctatattaataggagatagttgttgcggcatagtaaaaatgaaatgataactgtttaaaaatagctcttagtatgggaattacaatggatgaggaagtgatatttgaaactcctagagaattaatatctattaaacgaataaaagatattccaagatcaaaagacacgcatgtgtttgctgcgtgtataacaagtgacggatatccgttaataggagctagaagaacttcattcgcgttccaggcgatattatctcaacaaaattcagattctatctttagagtatccactaaactattacggtttatgtactacaatgaactaagagaaatctttagacggttgagaaaaggttctatcaacaatatcgatcctcactttgaagagttaatattattgggtggtaaactagataaaaaggaatctattaaagattgtttaagaagagaattaaaagaggaaagtgatgaacgtataacagtaaaagaatttggaaatgtaattctaaaacttacaacacgggataaattatttaataaagtatatataagttattgcatggcgtgttttattaatcaatcgttggaggatttatcgcatactagtatttacaatgtagaaattagaaagattaaatcattaaatgattgtattaacgacgataaatacgaatatctgtcttatatttataatatgctagttaatagtaaatgaacttttacagatctagtataattagtcagattattaagtataatagacgactagctaagtctattatttgcgaggatgactctcaaattattacactcacggcattcgttaaccaatgcctatggtgtcataaacgagtatccgtgtccgctattttattaactactgataacaaaatattagtatgtaacagacgagatagttttctctattctgaaataattagaactagaaacatgtttagaaagaaacgattatttctgaattattccaattatttgaacaaacaggaaagaagtatactatcgtcatttttttctctagatccagctactactgataatgatagaatagacgctatttatccgggtggcatacccaaaaggggtgagaatgttccagagtgtttatccagggaaattaaagaagaagttaatatagacaattcttttgtattcatagacactcggttttttattcatggcatcatagaagataccattattaataaattttttgaggtaatcttctttgtcggaagaatatctctaacgagtgatcaaatcattgatacatttaaaagtaatcatgaaatcaaggatctaatatttttagatccgaattcaggtaatggactccaatacgaaattgcaaaatatgctctagatactgcaaaacttaaatgttacggccatagaggatgttattatgaatcattaaaaaaattaactgaggatgattgattaaaaaatataaattaatttaccatcgtgtatttttataacgggattgtccggcatatcatgtagatagttaccgtctacatcgtatactcgaccatctacgcctttaaatcctctatttattgacattaatctattagaattggaataccaaatattagtaccctcaattagtttattggtaatattttttttagacgatagatcgatggctcttgaaaccaaggttttccaaccggactcattgtcgatcggtgagaagtctttttcattagcatgaatccattctaatgatgtatgtttaaacactctaaacaattggacaaattcttttgatttgctttgaatgatttcaaataggtcttcgtctacagtaggcataccattagataatctagccattataaagtgcacgtttacatatctacgttctggaggagtaagaacgtgactattgagacgaatggctcttcctactatctgacgaagagacgcctcgttccatgtcatatctaaaatgaagatatcattaattgagaaaaaactaataccctcgcctccactagaagagaatacgcatgttttaatgcattctccgttagtgtttgattcttggttaaactcagccaccgccttgattctagtatcttttgttctagatgagaactctatattagagataccaaagactttgaaatatagtaataagatttctattcctgactgattaacaaatggttcaaagactagacatttaccatgggatgctaatattcccaaacatacatctataaatttgacgcttttctcttttaattcagtaaatagagagatatcagccgcactagcatcccctttcaatagttctccctttttaaaggtatctaatgcggatttagaaaactctctatctcttaatgaatttttaaaatcattatatagtgttgctatctcttgcgcgtattcgcccggatcacgattttgtctttcaggaaagctatcgaacgtaaacgtagtagccatacgtctcagaattctaaatgatgatatacctgtttttatttcagcgagtttagccttttgataaatttcttcttgctttttcgacatattaacgtatcgcattaatactgttttcttagcgaatgatgcagacccttctacgtcatcaaaaatagaaaactcgttattaactatatacgaacatagtcctcctagtttggagactaattctttttcatcgactagacgtttattctcaaatagcgattggtgttgtaaggatcctggtcgtagtaagttaaccaacatggtgaattcttgcacactattgacgataggtgtagccgataaacaaatcatcttatggttttttaacgcaatggtcttagataaaaaattatatactgaacgagtaggacggatcttaccatcttctttgattaatgatttagaaatgaagttatgacattcatcaataatgacgcatattctactcttggaattaatagttttgatattagtaaaaaatttatttctaaaattttgatcatcgtaattaataaaaatacaatccttcgttatctctggagcgtatctgagtatagtgttcatccaaggatcttctatcaaagcctttttcaccaataagataatagcccaattcgtataaatatccttaagatgtttgagaatatatacagtagtcattgttttaccgacacccgtttcatggaacaataaaagagaatgcatactgtctaatcctaagaaaactcttgctacaaaatgttgataatccttgaggcgtactacgtccgaccccatcatttcaacgggcatattagtagttctgcgtaaggcataatcgatataggccgcgtgtgatttactcatttatgagtgataagtaataactatgttttaaaaatcacagcagtagtttaactagtcttctctgatgtttgttttcgatactttttgaatcagaagtcatactagaataaagcaacgagtgaacgtaatagagagcttcgtatactctattcgaaaactctaagaacttattaatgaattccgtatccactggattgtttaaaatactaaattgaacactgttcacatccttccaagaagaagacttagtgacggacttaacatgagacataaataaatccaaattttttttacaaacatcactagccaccataatggcgctatctttcaaccagctatcgcttacgcattttagcagtctaacatttttaaagagactacaatatattctcatagtatcgattacacctctaccgaataaagttggaagtttaataatacaatatttttcgtttacaaaatcaaataatggtcgaaacacgtcgaaggttaacatcttataatcgctaatgtatagattgttttcagtgagatgattattagatttaatagcatctcgttcacgtttgaacagtttattgcgtgcgctgaggtcggcaactacggcgtccgctttagtactcctcccataatactttacgctattaatctttaaaatttcatagactttatctagatcgctttctggtaacatgatatcatgtgtaaaaagttttaacatgtcggtcggcattctatttagatcattaactctagaaatctgaagaaagtaattagctccgtattccagactaggtaatgggcttttacctagagacagattaagttctggcaatgtttcataaaatggaagaaggacatgcgttccctcccggatattttttacaatttcatccatttacaactctatagtttgttttcattattattagttattatctcccataatcttggtaatacttaccccttgatcgtaagataccttatacaggtcattacatacaactaccaattgtttttgtacataatagattggatggttgacatccatggtggaataaactactcgaacagatagtttatctttccccctagatacattagccgtaatagttgtcggcctaaagaatatctttggtgtaaagttaaaagttagggttcttgttccattattgctttttgtcagtagttcattataaattctcgagatgggtccgttctctgaatatagaacatcatttccaaatctaacttctagtctagaaataatatcggtcttattcttaaaatctattcccttgatgaagggatcgttaatgaacaaatccttggcctttgattcggctgatctattatctccgttatagacgttacgttgactagtccaaagacttacaggaatagatgtatcgatgatgttgatactatgtgatatgtgagcaaagattgttctcttagtggcatcactatatgttccagtaatggcggaaaactttttagaaatgttatatataaaagaattttttcgtgttccaaacattagcagattagtatgaagataaacactcatattatcaggaacattatcaatttttacatacacatcagcatcttgaatagaaacgataccatcttctggaacctctacgatctcggcagactccggataaccagtcggtgggccatcgctaacaataactagatcatccaacaatctactcacatatgcatctatataatctttttcatcttgtgagtaccctggatacgaaataaatttattatccgtatttccataataaggtttagtataaacagagagagatgttgccgcatgaacttcagttacagtcgccgttggttggtttatttgacctattactctcctaggtttctctataaacgatggtttaatttgtacattcttaaccatatatccaataaagctcaattcaggaacataaacaaattctttgttgaacgtttcaaagtcgaacgaagagtcacgaataacgatatcggatactggattgaaggttaccgttacggtaatttttgaatcggatagtttaagactgctgaatgtatcttccacatcaaacggagttttaatataaacgtatactgtagatggttctttaatagtgtcattaggagttaggccaatagaaatatcattaagttcactagaatatccagagtgtttcaaagcaattgtattattgatacaattattatataattcttcgccctcaatttcccaaataacaccgttacacgaagagatagatacgtgattaatacatttatatccaacatatggtacgtaactgaatcttcccatacctttaacttctggaagttccaaactcagaaccaaatgattaagcgcagtaatatactgatccctaatttcgaagctagcgatagcctgattgtctggaccatcgtttgtcataactccggatagagaaatatattgcggcatatacaaagttggaatttgactatcgactgcgaagacattagaccgtttaatagagtcatccccaccgatcaaagaattaatgatagtattattcattttctatttaaaatggaaaaagcttacaataaactccgtagagaaatatctataatttgtgagttttccttaaagtaacagcttccgtaaacgccgtctttatctcttagtaggtttattgtatttatgaccttttccttatcttcatagaatactaaaggcaacaaagaaatttttggttcttctctaagagctacgtgagacttaaccatagaagccaacgaatccctacatattttagaacagaaataccctacttcaccacccttgtatgtctcaatactaataggtctaaaaaccaaatcttgattacaaaaccaacacttatcaattacactatttgtcttaatagacacatctgccatagatttataatactttggtagtatacaagcgagtgcttcttctttagcgggcttaaagactgctttaggtgctgaaataaccacatctggaaggcttactcgcttagccatttaattacggaactatttttttatacttctaatgagcaagtagaaaacctctcatctacaaaaacgtactcgtgtccataatcctctaccatagttacacgttttttagatctcatatgtgctaaaaagttttcccatactaattggttactattatttttcgtataatttttaacagtttgaggttttagatttttagttacagaagtgatatcgaatattttatccaaaaagaatgaataattaattgtcttagaaggagtgttttcttggcaaaagaataccaagtgcttaaatatttctactacttcattaatcttttctgtactcagattcagtttctcatcttttacttgattgattatttcaaagactaacttataatcctttttatttattctctcgttagccttaagaaaactagatacaaaatttgcatctacatcatccgtggatatttgatttttttccatgatatccaagagttccgagataatttctccagaacattgatgagacaataatctccgcaatacatttctcaaatgaataagtttattagacacgtggaagtttgactttttttgtacctttgtacatttttgaaataccgactcgcaaaaaatacaatattcatatccttgttcagatactataccgttatgtctacaaccgctacataatcgtagattcatgttaacactctacgtatctcgtcgtccaatattttatataaaaacattttatttctagacgttgccagaaaatcctgtaatatttttagttttttgggctgtgaataaagtatcgccctaatattgttaccgtcttccgccaatatagtagttaaattatccgcacatgcagaagaacaccgcttaggcggattcagtacaatgttatatttttcgtaccaactcatttaaatatcataatctaaaatagttctgtaatatgtctagcgctaatatattgatcataatcctgtgcataaattaagatacaacaatgtctcgaaatcatcgacatggcttcttccatagttagaagatcgtcgtcaaagttagcaacgtgattcatcaacatttgctgttttgaggcagcaaatactgaaccgtcgccattcaaccattcataaaaaccatcgtctgaatccattgataatttcttgtactggtttttgagagctcgcatcaatctagcatttctagctcccggattgaaaacagaaagaggatcgtacatccagggtccattttctgtaaatagaatcgtataatgtcccttcaagaagatatcagacgatccacaatcaaagaattggtctccgagtttgtaacaaactgcggactttaacctatacatgataccgtttagcataatttctggtgatacgtcaatcggagtatcatctattagagatctaaagccggtgtaacattctccaccaaacatattcttattctgacgtcgttctacataaaacatcattgctccattaacgataacaggggaatgaacagcactacccatcacattagttcccaatggatcaatgtgtgtaactccagaacatcttccatagcctatgttaggaggagcgaacaccactcttccactattgccatcgaatgccatagaataaatatccttggaattgatagaaatcggactgtcggatgttgtgatcatcttcataggattaacaactatgtatggtgccgcctgaagtttcatatcgtaactgatgccgtttataggtctagccacagaaaccaacgtaggtctaaatccaactatagacaaaatagaagccaatatctgttcctcatctgtcataacttgagagcatccagtatgaataatcttcattagatggggatctaccgcatcatcatcgttacaataaaaaattcccattctaatgttcataattgcttttctaatcatggtatgcatgtttgctctctgaatctctgtggaaattagatctgatacacctgtaatcactatcggattatcctccgtaagacgattaaccaacaacatataattataagactttacttttctaaattcataaagttgctggattaggctataggtgtctccatgtacatacgcgttctcgagcgcaggaagtttaataccgaatagtgccatcagaataggatgaatatagtaattagtttctggttttctataaataaaagacaaatcttgtgaactagacatatcggtaaaatgcatggattggaatcgtgtagtcgacagaagaatatgatgattagatggagagtatattttatctaactctttgagttggtcaccgattctaggactagctcgagaatgaataagtactaaaggatgagtacatttcacagaaacactagcattgttcaatgtgctctttacatgggtaaggagttgaaatagctcgtttctatttgttctgacaatatttagtttattcataatgttaagcatatcctgaatagtaaagttagatgtgtcatacttgttagtagttagatatttagcaattgcattcccatcatttctcaatctcgtactccaatcatgcgtggatgctacttcgtcgatggaaaccatacaatcctttttgataggctgttgagattgatcatttcctgcacgtttaggtttggtacgttgatttctagcccctgcggatataaagtcatcgtctacaatttgggacaatgaattgcatacactacaagacaaagatttatcagaagtgtgaatatgatcttcatctaccaaagaaagagtttgattagtataactagattttagtcctgcgttagatgttaaaaaaacatcgctattgaccacggcttccattatttatattcgtagtttttactcgaaagcgtgattttaatatccaatcttattacttttggaatcgttcaaaacctttgactagttgtagaatttgatctattgccctacgcgtatactcccttgcatcatatacgttcgtcaccagatcgtttgtttcggcctgaagttggtgcatatctctttcaacattcgacatgagatccttaagggccatatcgtctagattttgttgagatgctgctcctggatttggattttgttgtgctgttgtacatactgtaccaccagtaggtgtaggagtacatacagtggccacaataggaggttgagaaagtgtaaccgttggagtagtacaagaaatacttccatccgattgttgtgtacatgtagttgttggtaacgtctgagaaggttgggtagatggcggcgtcgtcgttttttgatctttattaaatttagagataatatcctgaacagcattgctcggcgtcaacgctggaaggagtgaactcgccggcgcatcagtatcttcagacagccaatcaaaaagattagacatatcagatgatgtattagtttgttgtcgtggttttggtgtaggagcagtactactaggtagaagaataggagccgatgtagctgttggaaccggctgtggagttatatgaatagttggttgtagcggttggataggctgtctgctggcggccatcatattatctctagctagttgttctcgcaactgtctttgataatacgactcttgagactttagtcctatttcaatcgcttcatcctttttcgtatccggatccttttcttcagaataatagattgacgactttggtgtagaggattctgccagcctctgtgagaacttgttaaagaagtccatttaaggctttaaaattgaattgcgattataagattaaatggcagacacagacgatattatcgactatgaatccgatgatctcaccgaatacgaggatgatgaagaagaggaagaagatggagagtcactagaaactagtgatatagatcccaaatcttcttataagattgtagaatcagcatccactcatatagaagatgcgcattccaatcttaaacatatagggaatcatatatctgctcttaaacgacgctatactagacgtataagtctatttgaaatagcgggtataatagcagaaagctataacttgcttcaacgaggaagattacctctagtttcagaattttctgacgaaacgatgaagcaaaatatgctacatgtaattatacaagagatagaggagggttcttgtcctatagtcatcgaaaagaacggagaattgttgtcggtaaacgattttgacaaagatggtctaaaattccatctagactatattatcaaaatttggaaacttcaaaaacgatattagaatttatacgaatatcgttctctaaatgtcacaatcaagtctcgcatgttcagcaatttattgtcgtactttatatcgtgttcattaacgatatcttgcaaaatagtaatgattctatcttccttcgatagatattcttcagagattattgtcttatattctttcttgttatcagatatgaatttgataagactttgaacattattgatacccgtctgtttaattttttctacagatattttagttttggcagattctatcgtatctgtcaatagacatccaacatcgacattcgacgtcaattgtctataaatcaacgtataaattttagaaataacattagcgaattgttgtgcgttgatgtcgttattctgaaacagtatgattttaggtagcattttcttaacaaagagaacgtatttattgttactcagttgaacagatgatatatccagattactaacgcatctgattccgtataccaaactttcagaagaaatggtatacaattgtttgtattcattcaatgtctctttttcagaaattagtttagagtcgaatactgcaataattttcaagagatagttttcatcagataagattttatttagtgtagatatgataaaactattgttttgttggagaacttgatacgccgcgttctctgtagtcgacgctctcaaatgggaaacaatctccattatttttttggaatcggatactatatcttcggtatcttgacgcagtctagtatacatagagttaagagagattagagtttgtacattaagcaacatgtctctaaatgtggctacaaacttttcctttttcacatcatctagtttattatataccgatttcacaacggcaccagatttaaggaaccagaatgaaaaactctgataactacaatatttcatcatagttacgattttatcatcttctatagttggtgtaatagcgcatacctttttctccaagactggaaccaacgtcataaaaatgtttaaatcaaaatccatatcaacatctgatgcgctaagaccagtctcgcgttcaagattatctttactaatggtgacgaactcatcgtataaaactctaagtttgtccattatttatttacagatttagttgtttaatttatttgtgctcttccagagttgggatagtatttttctaacgtcggtattatattattaggatctacgttcatatgtatcataatattaatcatccacgttttgataaatctatctttagcttctgaaataacgtatttaaacaaaggagaaaaatatttagctacggcatcagacgcaataacattttttgtaaatgtaacgtatttagacgacagatcttcgttaaaaagttttccatctatgtagaatccatcggttgttaacaccattcccgcgtcagattgaataggagtttgaatagtttgttttggaaatagatccttcaataacttatagttgggtgggaaaaaatcgattttatcactagactctttcttttttactatcattacctcatgaactatttcttgaatgagtatatgtattttctttcctatatcggacgcgttcattggaaaatataccatgtcgttaactataagaatatttttatcctcgtttacaaactgaataatatcagatgtagttcgtaaacgaactatatcatcaccagcacaacatctaactatatgatatccactagtttcctttagccgtttattatcttgttccatattagcagtcattccatcatttaagaaggcgtcaaaaataatagggagaaatgacattttggattctgttacaactttaccaaaattaaggatatacggacttactatctttttctcaacgtcaatttgatgaacacacgatgaaaatgtgcttctatgagattgatcatgtagaaaacaacaagggatacaatatttccgcatatcatgaaatatattaagaaatcccaccttattatatttccccaaaggatccatgcacgtaaacattatgccgttatcattaataaagacttctttctcatcggatctgtaaaagttgttactgatttttttcattccaggatctagataattaataatgatgggttttctattcttattctttgtattttggcatatcctagaccagtaaacagtttccactttggtaaaatcagcagacttttgaacgctattaaacatggcattaatggcaataactaaaaatgtaaaatatttttctatgttaggaatatggtttttcactttaatagatatatggtttttggccaaaatgatagatatttttttatccgaggatagtaaaatattattagtcgccgtctctataaaaatgaagctagtctcgatatccaattttattctagaattgataggagtcgccaaatgtaccttatacgttatatctcccttgatgcgttccatttgtgtatctatatcggacacaagatctgtaaatagttttacgttattaatcatcacggtatcgccgtcgctagataacgctaatgtaccatccaagtcccaaatggagagatttaactgttcatcgtttagaataaaatgattaccggtcatattaataaagtgttcatcgtatctagataacaacgacttataattaatgtccaagtcttgaactcgctgaatgatcttttttaacccagttagttttagattggtacgaaatatattgttaaactttgattctacagtaatgtccaaatctagttgtggaaatacttccatcaacattgtttcaaacttgataatattattatctacatcttcgtacgatccaaattccggaatagatgtatcgcacgctctggccacccagataaccaaaaagtcacacgctccaggatatacattgtataaaaagctatcgttttttagtagggtttttttctgcgtgtatacgaagggattaaaaatagtattatcaacgtaactatattccaaattattcttatgagaatagataataatatcgtccttaatatctaacaaatttcctaaatatccctttaattgagtcattcgaagcgtcaatagaatatgtctcttaactatttccggctgttgtatatttaaatgacttcgtaaaaaataatatatgggcgacttctcatctatgtaatcatatggagtgagatatagggctcgttctacctcctgccccttacccacctgtaataccaattgcggacttactatatatcgcatatttatatcgtggggtaaagtgaaaatctactaccgatgatgtaagtcttacaatgttcgaaccagtaccagatcttaatttggaggcctccgtagaactaggggaggtaaatatagatcaaacaacacctatgataaaggagaatagcggttttatatcccgcagtagacgtctattcgcccatagatctaaggatgatgagagaaaactagcactacgattctttttacaaagactttattttttagatcatagagagattcattatttgttcagatgcgttgacgctgtaaaagacgtcactattaccaaaaaaaataacattatcgtggcgccttatatagcacttttaactatcgcatcaaaaggatgcaaacttacagaaacaatgattgaagcattctttccagaactatataatgaacatagtaagaaatttaaattcaactctcaagtatccatcatccaagaaaaactcggataccagtttggaaactatcacgtttatgattttgaaccgtattactctacagtagctctggctattcgagatgaacattcatctggcatttttaatatccgtcaagagagttatctggtaagttcattatctgaaataacatatagattttatctaattaatctaaaatctgatcttgttcaatggagtgctagtacgggcgctgtaattaatcaaatggtaaatactgtattgattacagtgtatgaaaagttacaactggtcatagaaaatgattcacaatttacatgttcattggctgtggaatcaaaacttccaataaaattacttaaagatagaaatgaattatttacaaaattcattaacgagttaaaaaagaccagttcattcaagataagcaaacgcgataaggatacgctactaaaatattttacttaggactggagttagaatttatagacgactcatttcgtttatcattgttactattattactattactatcattattagtgttggcattattagtattcttcttgtcatcttgttcagaaatatacagcaatgctatacctaatactaaatacattatcatgctcgcaatggctctaacaacaacgaaccaaaatgaatttggtcgtagcttttgttcacaaaaatacataaagaaatgtctacataaatctatggcgccattggctacttgaaatagcgccagtcctcctacagattttaatatagctgtataacatgacatttattcatcatcaaaagagacagagtcaccatctgtcatatttagattttttttcatgtgttcaaagtatcctctactcatttcattataatagtttatcatacttagaattttaggacggatcaatgagtaagacttgactagatcgtcagtagtaatttgtgcatcgtctattctgcatccgcttcgtcgaataatgtatagcatcgctttgagattctccatagctatcaagtctttatacaatgacatggaaatatctgtgaatactttatacttctccaacatcgatgccttaacatcatcgcctactttagcattgaaaatacgttctattgtgtagatggatgtagcaagatttttaaacaacaatgccatcttacacgatgattgcctcaagtctccaatcgtttgtttagaacgattagctacagagtccaatgcttggctgactagcatattattatctttagaaattgtattcttcaatgaggcgtttatcatatctgtgatttcgttagtcatattacagtctgactgggttgtaatgttatccaacatatcacctatggatacggtacacgtaccagcatttgtaataatcctatctaagatgttgtatggcattgcgcagaaaatatcttctcctgtaatatctccactctcgataaatctactcagattattcttaaatgccttattctctggagaaaagatatcagtgtccatcatttcattaatagtatacgcagaaaagataccacgagtatcaattctatccaagatacttatcggttccgagtcacagataatggtttcctctccttcgggagatcctgcatagaaatatctaggacaatagtttctatactgtctgtaactctgataatctctaaagtcactaactgataccatgaaattgagaagatcaaacgctgaagtaattaatttttctgcctcgtttttactacaactagttttcatcaatgtagtgacgatgtattgtttagttacttttggtctaatactgatgatagagatattattgcttcccataatggatcttctagtagtcaccttaaagcccattgatgcgaatagcagatagataaagtcttggtatgactcctttctaatatagtacggactacctttgtcacccaactttatacccacataagccataacaacctctttaatagccgtttcatgaggtttatcagccatgagcctgagtagttggaagaatctcatgaatcccgtctcagaaagtcctatatgcatgatagatttatctttcctgggaaactctcgtatagtcatagatgaaatactctttaaagtttctgaaataagattagtaacagtcttacctccgactactctaggtaacaaacaaactctaataggtgttttctctgcggagataatatcagaaaggatagagcaataagtagtattattgtgattataaagaccgaatacataacaggtagaatttataaacatcatgtcctgaaggtttttagacttgtattcctcgtaatccataccgtcccaaaacatggatttggtaactttgatagccgtagatctttgttccttcgccaacaggttaaagaaattaataaagaatttgttgtttctatttatgtccacaaattgcacgtttggaagcgccacggttacattcactgcagcattttgaggatcgcgagtatgaagtacgatgttattgtttactggtatatctggaaagaaatctaccagtctaggaataagagattgatatcgcatagaaatagtaaagtttataatctcatcatcgaagagcattttgttaccattgtaataaatatccactctgtcatatgtataaatgaagtactgttcaaacatgatgagatgtttatatgttggcatagtagtgagatcgacgtttggtaatggcaatgtattaagattaactccataatgtctagcagcatctgcgatgttataagcgtcgtcaaagcggggtcgatcttgtattgttatatattgtctaacacctataagattatcaaaatcttgtctgcttaatacaccgttaacaatttttgccttgaattcttttattggtgcattaataacatccttatagaggatgttaaacaaataagtgttatcaaagttaagatctggatatttcttttctgctagaacatccattgagtcggagccatctggtttaatataaccaccgataaatctagctctgtattctgtatccgtcaatctaatattaagaaggtgttgagtgaaaggtggaagatcgtaaaagctgtgagtattaatgataggattagtttccgaactaatgttaattggggtattaataatatctatatttccagcgttaagtgtaacattaaacagttttaattcacgtgacgtggtatcaattaaataattaatgcccaatttggatatagcagcctgaagctcatcttgtttagttacggatcctaatgagttattaagcaatatatcgaacggatgaacgaaggttgttttaagttggtcacatactttgtaatctagacatagatgcggaagaacggtagaaactatacgaaataaatattcagagtcctctaattgatcaagagtaactattgacttaataggcatcatttatttagtattaaatgacgaccgtaccagtgacggatatacaaaacgatttaattacagagttttcagaagataattatccatctaacaaaaattatgaaataactcttcgtcaaatgtctattctaactcacgttaacaacgtggtagatagagaacataatgccgccgtagtgtcatctccagaggaaatatcctcacaacttaatgaagatctatttccagatgatgattcaccggccactattatcgaacgagtacaacctcatactactattattgacgatactccacctcctacgtttcgtagagagttattaatatcggaacaacgtcaacaacgagaaaaaagatttaatattacagtatcgaaaaatgctgaagcaataatggaatctagatctatgataacttctatgccaacacaaacaccatccttgggagtagtttatgataaagataaaagaattcagatgttagaggatgaagtggttaatcttagaaatcaacgatctaatacaaaatcatctgataatttagataattttaccaaaatactatttggtaagactccgtacaaatcaacagaagttaataagcgtatagccatcgttaattatgcaaatttgaacgggtcccccttatcagtcgaggacttggatgtttgttcggaggatgaaatagatagaatctataaaacgattaaacaatatcacgaaagtagaaaacgaaaaattatcgtcactaacgtgattattattgtcataaacattatcgagcaggcattgctaaaactcggatttgaagaaatcaaaggactgagtaccgatatcacttcagaaattatcgatgtggagatcggagatgactgcgatgctgtagcatctaaactaggaatcggtaacagtccggttcttaatattgtattgtttatactcaagatattcgttaaacgaattaaaattatttaatttaatacattcccatatccagacaacaatcgtctggattaatctgttcctgtcgtctcataccggacgacatattaatctttttattagtgggcatctttttagatggtttctttttcccagcattaactgagtcgatacctagaagatcgtgattgatctctccgaccattccacgaacttctaattggccgtctctgacggtaccataaactattttaccagcattagtaacagcttggacaatctgaccatccatcgcattgtacgatgtagtagtaactgttgttctacgtctaggagcaccagaagtatttttggagcccttggatgttgatgtagaagaagacgaggattttgattttggtttacatgtaatacattttgaactctttgattttgtatcacatgcgccggcagtcacatctgtttgagaattaagattattgttgcctcctttgacggctgcatctccaccgatttgcgctagtagatttttaagctgtggtgtaatcttattaactgtttcgatataatcatcgtaactgcttctaacggctaaattttttttatccgccatttagaagctaaaaatatttttatttatgcagaagatttaactagattatacaatgaactaatatgatccttttccagattatttacaaacttggtattttttggttctggaggaggcgaatttaaattcggacttggattcggattttgtaagttcttgatcttattatacatcgagtataggatggcgacagtaactgctacacaaataccgatcaaaagaagaataccaatcatttattgacaataacttcactattgatcaagtatgcaatatatcatcttttcactaaataagtagtaataatgattcaacaatgtcgagatatatggacgataataatttagttcatggaaatatcgctatgattggtgtgaatgactccgctaactctgtggggtgcgcagtgctttccccacatagaataaattagcattccgactgtgataataataccaagtataaacgccataatactcaatactttccatgtacgagtgggactggtagacttactaaagtcaataaaggcgaagatacacgaaagaatcaaaagaatgattccagcgattagcacgccggaaaaataatttccaatcataagcatcatgtccatttaactaataaaaattttaaatcgccgaatgaacaaagtggaatataaaccatataaaaacaatagtttgtactgcaaaaataatatctatttttgttttcgaagatatggtaaaattaaatagtagtacacagcatgttataactaacagcagcaacggctcgtaattacttatcatttactagacgaaaaggtggtgggatattttcttgctcaaataatacgaatatatcacccatccattttatgcgatgtttatatactctaatctttaatagatctatagacgacgggtttaccaacaatatagattttatcgattcatctaatttaaacccttccttaaacgtgaatgatctattatctggcataacgatgaccctacctgatgaatcggacaatgtactgggccatgtagaataaattatcaacgaattatcgtctacgaacatttatatcatttgttttaattttaggacgcgaataaatggatataaaatagaaaataacagatattacaaccagtgttatggccgcgcccaaccaggtaggcagttttattttatcttttactacaggttctcctggatgtacgtcaccaacggcggacgtagttctagtacaattagacgtaagttccgcttgggaattttttaacgctaaagagttaacgttaatcgtgcacccaacgtatttacatctagttcgttgaacatcttgattataatataaccattttctatctctagattcgtcagtgcactcatgtaaccaacataccctaggtcctaaatatttatctccggaattagattttggataattcgcgcaccaacaatttctatttcctttatgatcgttacaaaagacgtataatgccgtatccccaaaagtaaaataatcaggacgaataattctaataaactcagaacaatatctcgcatccatatgtttggagcaaatatcggaataagtagacatagccggtttccgttttgcacgtaaccattctaaacaattggggtttccaggatcgtttctacaaaatccagtcatgaaatcgtcacaatgttctgtcttgtaattattattaaatatttttggacagtgtttggtatttgtcttagaacaacattttgccacgctatcactatcgcccaggagataatccttttttataaaatgacatcgttgcccggatgctatataatcagtagcgtgttttaaatccttaatatattcaggagttacctcgttctgataatagattaatgatccaggacgaaatttgaaagaactacatggttctccatgaattaatacatattgtttagcaaattcaggaactataaaactactacaatgatctatcgacataccatctatcaaacaaaacttgggtttaatttctcccggagatgtttcataatagtacgtataactttcttctgcaaacttaacagctctattatattcaggataattaaaacctaattccatatatttgtctcgtatatctgctattcctggtgctattttgattctattaagagtaacagctgcccccattcttaataatcgtcagtatttaaactgttaaatgttggtatatcaacatctaccttatttcccgcagtataaggtttgttgcaggtatactgttcaggaatggttacatttatacttcttctatagtcctgtctttcgatgttcatcacatatgcaaagaacagaataaacaaaataatgtaagaaataatattaaatatctgtgaattcgtaaatacattgattgccataataattacagcagctacaatacacacaatagacattcccacagtgttgccattacctccacgatacatttgagttactaagcaataggtaataactaagctagtaagaggcaatagaaaagatgagataaatatcatcaatatagagattagaggagggctatatagagccaagacgaacaaaatcaaaccgagtaacgttctaacatcattatttttgaagattcccaaataatcattcattcctccataatcgttttgcatcatacctccatctttaggcataaacgattgctgctgttcctctgtaaataaatctttatcaagcactccagcacccgcagagaagtcgtcaagcatattgtaatatcttaaataactcatttatatattaaaaaatgtcactattaaagatggagtataatctttatgccgaactaaaaaaaatgacttgtggtcaacccctaagtctttttaacgaagacggggatttcgtagaagttgaaccgggatcatcctttaagtttctgatacctaagggattttacgcctctccttccgtaaagacgagtctagtattcgagacattaacaacgaccgataataaaatcactagtatcaatccaacaaatgcgccaaagttatatcctcttcaacgcaaagtcgtatctgaagtagtttctaatatgaggaaaatgatcgaatcaaaacgtcctctatacatcactcttcacttggcgtgtggatttggtaagactattaccacgtgttatcttatggctacacacggtagaaaaaccgtcatttgcgtacccaataaaatgttaatacatcaatggaagacacaggtagaggcagtcggattggaacataagatatccatagatggagtaagtagtctattaaaggaactaaagactcaaagtccggatgtattaatagtagtcagtagacatctgacaaacgatgccttttgtaaatatatcaataagcattatgatttgttcatcttggatgaatcacatacgtataatctgatgaacaatacagcagttacaagatttttagcgtattatcctccgatgatgtgttattttttaactgctacacctagaccatctaaccgaatttattgtaacagtattattaatattgccaagttatccaatctaaaaaaaactatctatgcagtagatagtttttttgagccatattccacagataatattagacatatggtaaaacgactagatggaccatctaataaatatcatatatataccgagaagttattatctgtagacgagcctagaaatcaacttattcttgataccctggtagaagaattcaagtcaggaactattaatcgcattttagttattactaaactacgtgaacatatggtattattctacaaacgattattagattttttcggaccagaggttgtatttataggagacgcccaaaatagacgtactccagatatggtcaaatcaatcaaggaactaaatagatttatattcgtatccaccttattttattccggtactggtttagatattcctagtttggattcgttgttcatttgctcggcagtaatcaacaatatgcaaatagagcaattactagggagggtatgtcgagaaacagaactattagataggacggtatatgtatttcctaacacatccatcaaagaaataaagtacatgataggaaatttcatgcaacgaattattagtctgtctgtagataaactaggatttaaacaaaaaagttatcggaaacatcaagaatccgatcccacttctgcatgtacaacatcatccagagaagaacgtgtattaaatagaatatttaactcgcaaaatcgttaagaagtttaagcgacgatccgcatgctgcgcaggccagtgtattacccctcatagtattaatataatccaatgatacttttgtgatgtcggaaatcttaaccaatttagactgacaggcagaacacgtcatgcaatcatcatcgtcatcgataactgtagtcttgggcttctttttgcgactcttcattccggaacgcacattggtgctatccatttaggtagtaaaaaataagtcagaatatgccctataacacgatcgtgcaaaacctggtatatcgtctctatctttatcacaatatagtgtatcgacatttttattattattgacctcgtttatcttggaacatggaatgggaacatttttgttatcaacggccatctttgccttaattccagatgttgtaaaattataactaaacagtctatcatcgacacaaatgaaattcttgtttagacgtttgtagtttacgtatgcggctcgttcgcgtctcattttttcagatattgcaggtactataatattaaaaataagaatgaaataacataggattaaaaataaagttatcatgacttctagcgctgatttaactaacttaaaagaattacttagtctgtacaaaagtttgagattttcagattctgcggctatagaaaagtataattctttggtagaatggggaacatctacttactggaaaataggcgtgcaaaaggtagctaatgtcgagacgtcaatatctgattattatgatgaggtaaaaaataaaccgtttaatattgatccgggctattacattttcttaccggtatattttgggagcgtctttatttattcgaagggtaaaaatatggtagaacttggatctggaaactcttttcaaataccagatgatatgcgaagtgcgtgtaacaaagtattagacagcgataacggaatagactttctgagatttgttttgttaaacaatagatggataatggaagatgctatatcaaaatatcagtctccagttaatatatttaaactagctagtgagtacggattaaacatacccaaatatttagaaattgaaatagaggaagacacattatttgacgacgagttatactctattatagaacgctctttcgatgataaatttccaaaaatatccatatcgtatattaagttgggagaacttagacggcaagttgtagactttttcaaattctcattcatgtatattgagtccatcaaggtagatcgtataggagataatatttttattcctagcgttataacaaaatcaggaaaaaagatattagtaaaagatgtagaccatttaatacgatccaaggttagagaacatacatttgtaaaagtaaaaaagaaaaacacattttccattttatacgactatgatggaaacggaacagaaactagaggagaagtaataaaacgaattatagacactataggacgagactattatgttaacggaaagtatttctctaaggttggtagtgcaggcttaaagcaattgactaataaattagatattaatgagtgcgcaactgtcgatgagttagttgatgagattaataaatccggaactgtaaaacgaaaaataaaaaaccaatcagcatttgatttaagcagagaatgtttgggatatccagaagcggattttataacgttagttaataacatgcggttcaaaatagaaaattgtaaggttgtaaatttcaatattgaaaatactaattgtttaaataacccgagtattgaaactatatatggaaactttaaccagttcgtctcaatctttaatgtcgtcaccgatgtcaaaaaaagattattcgagtgaaataatatgcgcctttgatataggtgcaaaaaatcctgccagaactgttttagaagtcaaggataactccgttagggtattggatatatcaaaattagactggagttctgattgggaaaggcgcatagctaaagatttgtcacaatatgaatacactacagttcttctagaacgtcagcctagaaggtcgccgtatgttaaatttatctattttattaaaggctttttatatcatacatcggctgccaaagttatttgcgtctcgcctgtcatgtctggtaattcatatagagatcgaaaaaagagatcggtcgaagcatttcttgattggatggacacattcggattgcgagactccgttccggatagacgcaaattagacgatgtagcggatagtttcaatttggctatgagatacgtattagataaatggaatactaattatacaccttataataggtgtaaatctagaaattacataaaaaaaatgtaataacgttagtaacgccattatggataatctatttacctttctacatgaaatagaagatagatatgccagaactatttttaactttcatctaataagttgcgatgaaataggagatatatatggtcttatgaaagaacgcatttcctcagaggatatgtttgataatatagtgtataataaagatatacatcctgccattaagaaactagtgtattgcgacatccaacttactaaacacattattaatcagaatacgtatccggtatttaacgattcttcacaagtgaaatgttgtcattatttcgacataaactcagataatagcaatattagctctcgtacagtagagatatttgagagggaaaagtcatctcttgtatcatatattaaaactaccaataagaagagaaaggtcaattacggcgaaataaagaaaactgttcatggaggcactaatgcaaattacttttccggtaaaaagtctgacgagtatctgagtactacagttagatccaacattaatcaaccttggatcaaaaccatctctaagaggatgagagttgatatcattaatcactctatagtaacgcgtggaaaaagctctatattacaaactatagaaattatttttactaatagaacatgtgtgaaaatattcaaggattctactatgcacattattctatccaaggacaaggatgaaaaggggtgtatacacatgattgacaaattattctatgtctattataatttatttctgttgttcgaagatatcatccaaaacgagtactttaaagaagtagctaatgttgtaaaccacgtactcacggctacggcattagatgagaaattattcctaattaagaaaatggctgaacacgatgtttatggagttagcaatttcaaaatagggatgtttaacctgacatttattaagtcgttggatcataccgttttcccctctctgttagatgaggatagcaaaataaagttttttaaggggaaaaagctcaatattgtagcattacgatctctggaggattgtataaattacgtgactaaatccgagaatatgatagaaatgatgaaggaaagatcgactattttaaatagcatagatatagaaacggaatcggtagatcgtctaaaagaattgcttctaaaatgaaaaaaaacactaattcagaaatggatcaacgactagggtataagtttttggtgcctgatcctaaagccggagttttttatagaccgttacatttccaatatgtatcgtattctaattttatattgcatcgattgcatgaaatcttgaccgtcaagcggccactcttatcgtttaagaataatacagaacgaattatgatagaaattagcaatgttaaagtgactcctccagattactcacctataatcgcgagtattaaaggtaagagttatgacgcattagccacgttcactgtaaatatctttaaagaggtaatgaccaaagagggtatatccatcactaaaataagtagttatgagggaaaagattctcatttgataaaaattccgctactaataggatacgggaataaaaatccacttgatacagccaagtatcttgttcctaatgtcataggtggagtctttatcaataaacaatctgtcgaaaaagtaggaattaatctagtagaaaagattacaacatggccaaaatttagggttgttaagccaaactcattcactttctcgttttcctccgtatcccctcctaatgtattaccgacaagatatcgccattacaagatatctctggatatatcacaattggaagcgttgaatatatcatcgacaaagacatttataacggtcaatattgttttgctgtctcaatatttatctagagtgagtctagaattcattagacgtagtttatcatacgatatgcctccagaagttgtctatctagtaaacgcgataatagatagtgctaaacgaattactgaatctattactgactttaatattgatacatacattaatgacctggtggaagctgaacacattaaacaaaaatctcagttaacgatcaacgagttcaaatatgaaatgctgcataactttttacctcatatgaactatacacccgatcaactaaagggattttatatgatatctttactaagaaagtttctctactgtatcttccacacttctagatatccagatagagattcgatggtttgtcatcgcatcctaacgtacggcaaatattttgagacgttggcacatgatgaattagagaattacataggcaacatccgaaacgatatcatgaacaatcacaagaacagaggcacttacgcggtaaacattcatgtactaacaactcccggacttaatcacgcgttttctagcttattgagtggaaagttcaaaaagtcagacggtagttatcgaacacatcctcactattcatggatgcagaatatttctattcctaggagtgttggattttatccggatcaagtaaagatttcaaagatgttttctgtcagaaaataccatccaagtcaatatctttacttttgttcatcagacgttccggaaagaggtcctcaggtaggtttagtatctcaattgtctgtcttgagttccattacaaatatactaacgtctgagtatttggatttggaaaagaaaatttgtgagtatatcagatcatattataaagatgatataagttactttgaaacaggatttccaatcactatagaaaatgctctagtcgcatctcttaatccaaatatgatatgtgattttgtaactgactttagacgtagaaaacggatgggattcttcggtaacttggaggtaggtattactttagttagggatcacatgaatgaaattcgcattaatattggagcgggaagattagtcagaccattcttggttgtggataacggagagctcatgatggatgtgtgtccggagttagaaagcagattagacgacatgacattctctgacattcagaaagagtttccgcatgtcatcgaaatggtagatatagaacaatttacttttagtaacgtatgtgaatcggttcaaaaatttagaatgatgtcaaaggatgaaagaaagcaatacgatttatgtgactttcctgccgaatttagagatggatatgtagcatcttcattagtgggaatcaatcacaattctggacccagagctattcttggatgtgctcaagctaaacaagctatctcttgtctgagctcggatatacgaaataaaatagacaatggaattcatttgatgtatccagagaggccaatcgtgattagtaaggctttagaaacttcaaagattgcggctaattgcttcggccaacatgttactatagcattaatgtcgtacaaaggtatcaatcaagaggatggaattatcatcaaaaaacaatttattcagagaggcggtctcgatattgttacagccaagaaacatcaagtagaaattccattggaaaactttaataacaaagaaagagataggtctaacgcctattcaaaattagaaagtaatggattagttagactgaatgctttcttggaatccggagacgctatggcacgaaatatctcatcaagaactcttgaagatgattttgctagagataatcagattagcttcgatgtttccgagaaatataccgatatgtacaaatctcgcgttgaacgagtacaagtagaacttactgacaaagttaaggtacgagtattaaccatgaaagaaagaagacccattctaggagacaaatttaccactagaacgagtcaaaagggaacagtcgcgtatgtcgcggatgaaacggaacttccatacgacgaaaatggtatcacaccagatgtcattattaattctacatccatcttctctagaaaaactatatctatgttgatagaagttattttaacagccgcatattctgctaagccgtacaacaataagggagaaaaccgacctgtctgttttcctagtagtaacgaaacatccatcgatacatatatgcaattcgctaaacaatgttatgagcattcaaatccgaaattgtccgatgaagaattatcggataaaatcttttgtgaaaagattctctatgatcctgaaacggataagccttatgcatccaaagtattttttggaccaatttattacttgcgtctgaggcatttaactcaggacaaggcaaccgttagatgtagaggtaaaaagacgaagctcattagacaggcgaatgagggacgaaaacgtggaggaggtatcaagttcggagaaatggagagagactgtttaatagcgcatggtgcagccaatactattacagaagttttgaaagattcggaagaagattatcaagatgtgtatgtttgtgaaaattgtggagacatagcagcacaaatcaagggtattaatacatgtcttagatgttcaaaacttaatctctctcctctcttaacaaaaattgataccacgcacgtatctaaagtatttcttactcaaatgaacgccagaggcgtaaaagtcaaattagatttcgaacgaaggcctccttcgttttataaaccattagataaagttgatctcaagccgtcttttctggtgtaatattctagtttggtagtagatacatatcaatatcatcaaattcgagatccgaattataaaatgggcgtggattgttaactatagaatcggacgtctgatattcgaaaatctgtggagtttcaggttttggtggaggtgtaactgctacttgggatactgaagtctgatattcagaaagctgtggatgttctggttcggcatccaccgatggtgtcacatcactaatcggttcggtaacgtctgtggatggaggtgctacttctacagaacctgtagcctcagttgtcaacggagatacatttttaatgcgagaaaatgtataatttggtaatggtttcttatgtggatctgaagaagaggtaagatatctactagaaagataccgatcacgttctagttctcttttgtagaacttaactttttctttctccgcatctagttgatattccaacctcttcacgttactacgttcagattccaattcacgttcgcatgggttacctccgcagtttttacgagcgatttcacgttcagccttcatgcgtctctccctctctctatcgagtttatcagagcagtctttctgaaggcgatcgaactccataaatttctccaacgctttgattgtttccatagatttccgaagttcagcttttaggactgtgattctttttctttcgaattcacagctggatgtacaaccgtttccattaccgccatctctaagtttcttttctagatcggcaacatttcatccccatgccttttacattcctcgagtctactgtcgtcgaaatatcgttccagctccttttcgacatcaataactttagcacgttgtctctcaagctctcttttgtagttatctgattccctggcacgtttaagatcttcatgcaattgagtcagctcttaacttcctctcttgcttcttcgtcatagtacgcgcaatcactgtgagatccattgttaccacgtctacactcggcgagctcgcgtttaagagattcaatttcccgtttgtattggtccatgtttccattgctaccaccattagatttacaggctgctagttgtcgttcgagatcagaaatacgggttttcttggaattgatttcgtcgatgtacttggcatcgaaacacttattaagttctttttccaattctacgattttatttctttcgcgagtcaattccctcctgtagtaactatctgttttgtcagattcacgctctctacgtagactttcttgcaagttactaatttgttccctagcacgtccgagtttagttttatatgctgaatagagttctgattcatcctttgagcagatctctagcgatcgtttaagattcctaattctagtctttagcctatttacctcctcagaagatgttccgttaccgttgcgtttacactcgttaagctgtctatcaagatccatgattctatctctaagacgttgcatctctctttccatatcagcattgctttcattattacgtctgcagtcactcaactgtctttcaatatctgagattctatctctaagacgtcgcatctctctctgtttcggcattggtttcattattacgtttacagtcgttcaactgtctttcaagatctgatattctagattggagtctgctaatctctgtagcattttcacggcattcactcagttgtctttcaagatctgaaattttagattggagtctgctaatctctgtaagatttcctcctccgctctcgatgcagtcggtcaacttattctctagttctctaatacgcgaacgcagtgcatcaacttcttgcgtgtcttcctggttgcgtgtacattcatcgagatctctaacgcgtcgtcgttcttcctcaagttctctgcgtactacagaaagcgtgtccctatcttgttgatatttagcaatttctgattctagagtactgattttgcttacgtagttactaatagttgtcttggccttatcaagatcctccttgtatttgtcgcattccttgatatccctacgaagtctggacagttcccattcgacattacgacgtttatcgatttcagctcggagatcgtcatcgcgttgttttagccacatacgactgagttcaagttctcgttgacaagatccatctacttttccattcctaatagtatccagttccttttctagttctgaacgcatttctcgttccctatcaagcgattctctcaattctcggatagtcttcttatcaatttctaataaatctgaaccatcatctgtcccattttgaatatccctgtgttctttgatctcttttgtaagtcggtcgattctttcggttttataaacagaatccctttccaaagtcctaatcttactgagtttatcactaagttctgcattcaattcggtgagttttctcttggcttcttccaactctgttttaaactctccactatttccgcattcttcctcgcatttatctaaccattcaattagtttattaataactagttggtaatcagcgattcctatagccgttcttgtaattgtgggaacataattaggatcttctaatggattgtatggcttgatagcatcatctttatcattattagggggatggacaaccttaattggttggtcctcatctcctccagtagcgtgtggttcttcaataccagtgttagtaataggcttaggcaaatgcttgtcgtacgcgggcacttcctcatccatcaagtatttataatcgggttctacttcagaatattcttttctaagagacgcgacttcgggagttagtagaagaactctgtttctgtatctatcaacgctggaatcaatactcaagttaaggatagcgaatacctcatcgtcatcatccgtatcttctgaaacaccatcatatgacatttcatgaagtctaacgtattgataaatagaatcagatttagtattaaacagatccttaacctttttagtaaacgcatatgtatattttagatctccagatttcataatatgatcacatgccttaaatgtcagtgcttccatgatataatctggaacactaatgggtgacgaaaaagatacagcaccatatgctacgttgataaataaatctgaaccactaagtagataatgattaatgttaagaaagaggaaatattcagtgtataggtatgtcttggcgtcatatcttgtactaaacacgctaaacagtttgttaatgtgatcaatttccaatagattaattagagcagcgggaataccaacaaacatattaccacatccgtattttctatgaatatcacatatcatgttaaaaaatcttgatagaagagcgaatatctcgtctgacttaatgagtcgtagttcagcagcaacataagtcataactgtaaatagaacatactttcctgtagtgttgattctagactccacatcaacaccattattaaaaatagttttatatacatctttaatctgctctccgttaatcgtcgaacgttctagtatacggaaacactttgatttcttatctgtagttaatgacttagtgatatcacgaagaatattacgaattacatttcttgtttttcttgagagacctgattcagaactcaactcatcgttccatagtttttctacctcagtggcgaaatctttggagtgcttggtacatttttcaataaggttcgtgacctccatttattataaaaaatttattcaaaacttaactacaatcgggtaattataagatcgtagatctcccatgtggcggaatactaccatctatcgcatgtggatggacagtaggtaatggccatgggaacagtaatgtttgcatatttatctttcttgctagtattactgcatattgtcccaatgtttcgatgtgatgttctaacctatcaactgccgctgtatcacaacaatagtgtccgatgaaattaagattatgatccaatgtgtttaatatatgattatcaagtcttatacgatccgcgtcttttttgacaggatcaggttcttctacaggaagaagtttcggcctcttatgatattcatgtctgggaaacggtggtctagggtgaggctccggtatcggagtgggttttggattataatcatcatcgtctatgacatcatcttcgacttcgatatttattttgctatcttgatgatgtcctgtatcagttgcattttcagcactcgactgaatattagcgcattcattgtctattattaccatatttctaaacccaaaatgtatgtgttgaacatcagtactatcgttgatgagtcttatagcatgaattcgcttatcgttatcgggtttatcttctgtcaccttagcaattccttttttattaaactctacataatcatatccatttctattgtttgttctaatataaacgagtatagcatcattgctaaatttttcaatagtatcaaaaacagaatatcctaaaccatataatatatattcaggaacactcaaactaaatgtccaggattctcctaaatacgtaaactttaatagtgcgaaatcattcaaaaatctaccacttatagatagatagtacataaatgcgtatagtagtctacctatctctttattatgaaaaccggcattacgatcatatatgtcgtgatatacctgtgatccgtttacgttaaaccataaatacatgggtgatcctataaacatgaatttatttctaattctcagagctatagttaattgaccgtgtaatatttgcttacatgcatacttgatacgcttattaataagatttttatcattgctcgttatttcagaatcgtatatataaggagtaccatcgtgattcttaccagatattatacaaaatactatatataaaatatattgacccacgttagtaatcatataaatgtttaacgttttaaattttgtattcaatgatccattatcatacgctatcatggtcttgtaatattcattctttaaaatataatattgtgttagccattgcattggagctcctaatggagattttctattctcatccattttaggataggctttcataaagtccctaataacttcgtgaataatgtttctatgttttctactgatgcatgtatttgcttcgatttttttatcccatgtttcatctatcatagatttaaacgcagtaatgctcgcaacattaacatcttgaaccgttggtacaattccgttccataaatttataatgttcgccatttatataactcattttttgaatatacttttaattaacaaaagagttaagttactcatatggacgccgtccagtctgaacatcaatctttttagccagagatatcatagccgctcttagagtttcagcgtgattttccaacctaaatagaacttcatcgttgcgtttacaacacttttctatttgttcaaactttgttgttacattagtaatctttttttccaaattagttagccgttgtttgagagtttcctcattgtcgtcttcatcggctttaacaattgcttcgcgtttagcctctggctttttagcagcctttgtagaaaaaaattcagttgctggaattgcaagatcgtcatctccggggaaaagagttccgtccatttaaagtacagattttagaaactgacactctgcgttatttatatttggtacaacacatggattataaatattgatgttaataacatcagaaaatgtaaagtctatacattgttgcatcgtgttaaattttctaatggatctagtattattgggtccaacttctgcctgaaatccaaatatggaagcggatacaaaaccgtttcctggataaaccacacatctccacttttgctttacatcagaaattgtgtcgttgacatcttgaactctcctatctaatgccggtgttccacctatagattttgaatattcgaatgctgcatgagtagcattaaattccttaatattgccataattttcatatattgagtaaccctggataaaaagtaaacacaccgcagccgtcgctaccacaataaaaaaaattgatagagagttcatttataatctattagaagctgacaaaatttttttacacgcatcagacaatgctttaataaatagttcaacatctacttttgtcatatcgaaccgatggtatgattctaacctagaattacatccgaaaaagttgactatgttcatagtcattaagtcattaacaaacaacattccagactctggattataagacgatactgtttcgtcacaattacctaccttaatcatgtgattatgaatattggctattagagcaccttctaagaaatctataatatctttgaaacacgatttaaaatcaaaccacgaatatacttctacgaagaaagttagtttacccataggagaaataactataaatggagatctaaatacaaaatccggatctatgatagttttaacattattatattctctattaaatacctccacatctaaaaatgttaattttgaaactatgtcttcgtttattaccgtacctgaactaaacgctataagctctattgtttgagaactctttaaacgatattcttgaaatacatgtaacaaagtttcctttaactcggtcggtttatctaccatagttacagaatttgtatccttatctataatataataatcaaaatcgtataaagttatataattatcgcgttcagattgtgatcttttcaaatagactaaaaaccccatttctctagtaagtatcttatgtatatgtttgtaaaatatcttcatggtgggaatatgctctaccgcagttagccattcctcattgacagcggtagatgtattagacaaaactattccaatgtttaacaagggccattttacgagattattaaatccttgtttgataaatgtagccaatgagggttcgagttcaacgacgattgaattctcttcccgcggatgctgcatgatgaacgacgggatgttgttcgattgatttggaattctttttcgactttttgtttatattaaatattttaaaatttatagcggatagcaattcatgtaccacggataatgtagacgcgtattgcgcatcgatatctttattattagataaatttatcaataaatgtgagaagtttgcctcgttaaggtcttccatttaaatattatataaacatttgtgtttgtatcttattcgtcttttatggaatagttttttactagtaaagctgcaattacacactttgtccgtaaaacataaatataaacaccagcttttatcaatcgttccaaaaagtcgacggcggacatttttaacatggcatctattttaaatacacttaggtttttggaaaaaacatcattttataattgtaacgattcaataactaaagaaaagattaagattaaacataagggaatgtcatttgtattttataagccaaagcattctaccgttgttaaatacttgtctggaggaggtatatatcatgatgatttggttgtattggggaaggtaacaattaataatctaaagatgatgctattttacatggatttatcatatcatggagtgacaagtagtggagcaatttacaaattgggatcgtctatcgatagactttctctaaataggactattgttacaaaagttaataattatgatgatacattttttgacgacgatgattgatcgctattgcacaattttgtttttgtactttctaatatagtgtttaggttctttttcatatgagaatattgatttactaaaatatctatgtttaacttttgttctatgacgtccttatcggcggtatcggtacatatacgtaattcaccttcacaaaatacggagtcttcgataataatagccaatcgattattggatctagctgtctgtatcatattcaacatgtttaatatatcctttcgtttcccctttacaggcatcgatcgtagcatattttccgcgtctgatatggaaatgttaaaactacaaaaatgcgtaatgttagcccgtcctaatattggtacgtgtctataagtttggcatagtagaataatagacgtgtttaaatgccttccaaagtttaagaattctattagagtattgcattttgatagtttatcgcctacatcatcaaaaataagtaaaaagtgtgctgattttttatgattttgtgcgacagcaatacatttttctatgttacttttagttcgtatcagattatattctagagattcctgactactaacgaaattaatatgatttggccaaatgtatccatcataatctgggttataaacgggtgtaaacaagaatatatgtttatattttttaactagtgtagaaaacagagatagtaaatagatagtttttccagatccagatcctcctgttaaaaccattctaaacggcatttttaataaattttctcttgaaaattgtttttcttggaaacaattcataattatatttacagttactaaattaatttgataataaatcaaaatatggaaaactaaggttgttagtagggaggagaacaaagaaggcacatcgtgatataaataacatttattatcatgatgacaccagaaaacgacgaagagcagacatctgtgttctccgctactgtttacggagacaaaattcagggaaagaataaacgcaaacgcgtgattggtctatgtattagaatatctatggttatttcactactatctatgattaccatgtccgcgtttctcatagtgcgcctaaatcaatgcatgtctgctaacgaggctgctattactgacgccgctgttgccgttgctgctgcatcatctactcatagaaaggttgcgtctagcactacacaatatgatcacaaagaaagctgtaatggtttatattaccagggttcttgttatatattacattcagactaccagttattctcggatgctaaagcaaattgcactgcggaatcatcaacactacccaataaatccgatgtcttgactacctggctcattgattatgttgaggatacatggggatctgatggtaatccaattacaaaaactacatccgattatcaagattctgatgtatcacaagaagttagaaagtatttttgtgttaaaacaatgaactaatatttatttttgtacattaataaatgaaatcgcttaatagacaaactgtaagtaggtttaagaagttgtcggtgccggccgctataatgatgatactctcaaccattattagtggcataggaacatttctgcattacaaagaagaactgatgcctagtgcttgcgccaatggatggatacaatacgataaacattgttatttagatactaacattaaaatgtctacagataatgcggtttatcagtgtcgtaaattacgagctagattgcctagacctgatactagacatctgagagtattgtttagtattttttataaagattattgggtaagtttaaaaaagaccaatgataaatggttagatattaataatgataaagatatagatattagtaaattaacaaattttaaacaactaaacagtacgacggatgctgaagcgtgttatatatacaagtctggaaaactggttaaaacagtatgtaaaagtactcaatctgtactatgtgttaaaaaattctacaagtgacaacaaaaaatgaattaataataagtcgttaacgtacgccgccatggacgccgcgtttgttattactccaatgggtgtgttgactataacagatacattgtatgatgatctcgatatctcaatcatggactttataggaccatacattataggtaacataaaaactgtccaaatagatgtacgggatataaaatattccgacatgcaaaaatgctactttagctataagggtaaaatagttcctcaggattctaatgatttggctagattcaacatttatagcatttgtgccgcatacagatcaaaaaataccatcatcatagcatgcgactatgatatcatgttagatatagaagataaacatcagccattttatctattcccatctattgatgtttttaacgctacaatcatagaagcgtataacctgtatacagctggagattatcatctaatcatcaatccttcagataatctgaaaatgaaattgtcgtttaattcttcattctgcatatcagacggcaatggatggatcataattgatgggaaatgcaatagtaattttttatcataaaagttgtaaagtaaataataaaacaataaatattgaactagtagtacgtatattgagcaatcagaaatgatgctggtacctcttatcacggtgaccgtagttgcgggaacaatattagtatgttatatattatatatttgtaggaaaaagatacgtactgtctataatgacaataaaattatcatgacaaaattaaaaaagataaagagttctaattccagcaaatctagtaaatcaactgatagcgaatcagactgggaggatcactgtagtgctatggaacaaaacaatgacgtagataatatttctaggaatgagatattggacgatgatagcttcgctggtagtttaatatgggataacgaatccaatgttatggcgcctagcacagaacacatttacgatagtgttgctggaagcacgctgctaataaataatgatcgtaatgaacagactatttatcagaacactacagtagtaattaatgaaacggagactgttgaagtacttaatgaagataccaaacagaatcctaactattcatccaatcctttcgtaaattataataaaaccagtatttgtagcaagtcaaatccgtttattacagaacttaacaataaatttagtgagaataatccgtttagacgagcacatagcgatgattatcttaataagcaagaacaagatcatgaacacgatgatatagaatcatcggtcgtatcattggtgtgattagtttcctttttataaaattgaagtaatatttagtattattgctgccgtcacgttgtacaaatggagatattccctgtattcggcatttctaaaattagcaattttattgctaataatgactgtagatattatatagatacagaacatcaaaaaattatatctgatgagatcaatagacagatggatgaaacggtacttcttaccaacatcttaagcgtagaagttgtaaatgacaatgagatgtaccatcttattcctcatagattatcgacgattatactctgtattagttctgtcggaggatgtgttatctctatagataatgacatcaatggcaaaaatattctaacctttcccattgatcatgctgtaatcatatccccactgagtaaatgtgtcgtagttagcaagggtcctacaaccatattggttgttaaagcggatatacctagcaaacgattggtaacatcgtttacaaacgacatactatatgtaaacaatctgtcactgattaattatttgccgttgtctgtattcattattagacgagtcaccgactatttggatagacacatatgcgatcagatatttgctaataataagtggtattcccttataaccatcgacgataagcaatatcctattccatcaaactgtataggtatgtcctctgccaagtacataaattctagcatcgagcaagatactttaatccatgtttgtaacctcgagcatccgttcgactcagtatacaaaaaaatgcagtcgtacaattctctacctatcaaggaacaaatattgtacggtagaattgataatataaatatgagcattagtatttctgtggattaatagatttctagtatggggatcattaatcatctctaatctctaaatacctcataaaacgaaaaaaaagctattatcaaatactgtacggaatggattcattctcttctctttttatgaaactctgttgtatatctactgataaaactggaagcaaaaaatctgatagaaagaataagaataagatcaaggattatatggaacacgattattataaaataacaatagttcctggttcctcttccacgtctactagctcgtggtattatacacatgcctagtaatagtctctttgcgttgacggaaagcagactagaaataacaggctaaaatgttcagacaccataatagttcccaacccagataataacagagttccatcaacacattcctttaaactcaatcccaaacccaaaaccgttaaaatgtatccggccaattgatagtagataatgaggtgtacagcgcatgataatttacacagtaaccaaaatgaaaatactttagtaattataagaaatatagacggtaatgtcatcatcaacaatccgataatatgcctgagagtaaacattgacggataaaacaaaaatgctccgcataactctatcatggcaataacacaaccaaatacttgtaagattcctaaattagtagaaaatacaacgaatatcgatgtataagtgatctcgagaaataataagaataaagtaatgcccgtaaagataaacatcaacattgtttggtaatcattaaaccaattagtatgaagttgaactaatttcacagtagattttattccagtgttatcctcgcatgtataagtacctggtaagatatctttatattccataatcaatgagacatcactatctgataacgaatgaagtctagcactagtatgccatttacttaatattgtcgtcttggaagttttattataagttaaaatatcatggttatccaatttccatctaatatactttgtcggattatctatagtacacggaataatgatggtatcattacatgctgtatactctatggtctttgtagttgttataacaaccaacgtatagaggtatatcaacgatattctaactcttgacattttttatttatttaaaatgatacctttgttatttattttattctattttgctaacggtattgaatggcataagtttgaaacgagtgaagaaataatttctacttacttattagacgacgtattatacacgggtgttaatggggcggtatacacattttcaaataataaactaaacaaaactggtttaactaataataattatataacaacatctataaaagtagaggatgcggataaggatacattagtatgcggaaccaataacggaaatcccaaatgttggaaaatagacggttcagacgacccaaaacatagaggtagaggatacgctccttatcaaaatagcaaagtaacgataatcagtcacaacggatgtgtactatctgacataaacatatcaaaagaaggaattaaacgatggagaagatttgacggaccatgtggttatgatttattcacggcggataacgtaattccaaaagatggtttacgaggagcattcgtcgataaagacggtacttatgacaaagtttacattcttttcactgatactatcggctcaaagagaattgtcaaaattccgtatatagcacaaatgtgcctaaacgacgaaggtggtccatcatcattgtctagtcatagatggtcgacgtttctcaaagtcgaattagaatgtgatatcgacggaagaagttatagacaaattattcattctagaactataaaaacagataatgatacgatactatatgtattcttcgatagtccttattccaagtccgcattatgtacctattctatgaataccattaaacaatctttttctacgtcaaaattggaaggatatacaaagcaattgccgtctccagctcctggtatatgtttaccagctggaaaagttgttccacataccacgtttgaagtcatagaacaatataatgtactagatgatattataaagcctttatctaaccaacctatcttcgaaggaccgtctggtgttaaatggttcgatataaaggagaaggaaaatgaacatcgggaatatagaatatacttcataaaagaaaattctatatattcgttcgatacaaaatctaaacaaactcgtagctcgcaagtcgatgcgcgactattttcagtaatggtaactgcgaaaccgttatttatagcagatatagggataggagtaggaatgccacaaatgaaaaaaatacttaaaatgtaatcttaatcgagtacaccacacgacaatgaacaaacataagacagattatgctggttatgcttgctgcgtaatatgcggtctaattgtcggaattatttttacagcgacactattaaaagttgtagaacgtaaattagttcatacaccattaatagataaaacgataaaagatgcatatattagagaagattgtcctactgactggataagctataataataaatgtatccatttatctactgatcgaaaaacctgggaggaaggacgtaatgcatgcaaagctctaaattcaaattcggatctaattaagatagagactccaaacgagttaagttttttaagaagccttagacgaggctattgggtaggagaatccgaaatattaaaccagacaaccccatataattttatagctaagaatgccacgaagaatggaactaaaaaacggaaatatatttgtagcacaacgaatactcccaaactgcattcgtgttacactatataacaattacactacatttttatcataccactacttcggttagatgttttagaaaaaaataaatatcgccgtaccgttcttgtttttataaaaataacaattaacaattatcaaattttttctttaatattttacgtggttgaccattcttggtggtaaaataatctcttagtgttggaatggaatgctgtttaatgtttccacactcatcgtatattttgacgtatgtagtcacatcgtttacgcaatagtcagactgtagttctatcatgcttcctacatcagaaggaggaacagttttaaagtctcttggttttaatctattaccgttagttttcatgaaatcctttgttttatccacttcacattttaaataaatgtccactatacattcttttgttaattttactagatcgtcatgggtcatagaatttataggttccgtagtccatggatccaaactagcaaacttcgcgtatacggtatcgcgattagtgtatacaccaactgtatgaaaattaagaaaacagtttaataaatcaacagaaatatttaatcctccgtttgatacagatgcgccatatttatggatttcggattcacacgttgtttgtctgaggtgttcgtctagtgttgcttctacgtaaacttcgattcccatatattctttattgtcagaatcgcataccgatttatcatcatacactgtttgaaaactaaatggtatacacatcaaaataataaataataacgagtacattctgcaatattgttatcgtaattggaaaaatagtgttcgagtgagttggattatgtgagtattggattgtatattttattttatattttgtaataagaataaaatgctaatgtcaagtttattccaatagatgtcttattaaaaacatatataataaataacaatggctgaatggcataaaattatcgaggatatctcaaaaaataataagttcgaggatgccgccatcgttgattacaagactacaaagaatgttctagctgctattcctaacagaacatttgccaagattaatccgggtgaaattattcctctcatcactaatcgtaatattctaaaacctcttattggtcagaaatattgtattgtatatactaactctctaatggatgagaacacgtatgctatggagttgcttactgggtacgcccctgtatctccgatcgttatagcgagaactcataccgcacttatatttttgatgggtaagccaacaacatccagacgtgacgtgtatagaacgtgtagagatcacgctacccgtgtacgtgcaactggtaattaaaataaaaagtaatattcatatgtagtgtcaattttaaatgatgatgatgaaatggataatatccatattgacgatgtcaataatgccggtattggcatacagttcatcgatttttagatttcattcagaggatgtggaattatgttatgggcatttgtattttgataggatctataatgtagtaaatataaaatataatccgcatattccatatagatataattttattaatcgcacgttaaccgtagatgaactagacgataatgtcttttttacacatggttattttttaaaacacaaatatggttcacttaatcctagtttgattgtctcattatcaggaaacttaaaatataatgatatacaatgctcagtaaatgtatcgtgtctcattaaaaatttggcaacgagtacatctactatattaacatctaaacataagacttattctctacatcggtccacgtgtattactataataggatacgattctattatatggtataaagatataaatgacaagtataatgacatctatgattttactgcaatatgtatgctaatagcgtctacattgatagtgaccatatacgtgtttaaaaaaataaaaatgaactcttaattatgctatgctattagaaatggataaaatcaaaattacggttgattcaaaaattggtaatgttgttaccatatcgtataacttggaaaagataactattgatgtcacacctaaaaagaaaaaagaaaaggatgtattattagcgcaatcagttgctgtcgaagaggcaaaagatgtcaaggtagaagaaaaaaatattatcgatattgaagatgacgatgatatggatgtagaaagcgcgtaatacgatctataaaaataagtatataaatactttttatttactgtactcttactgtgtagtggtgataccctactcgattatttttttaaaaaaaaaatacttattctgattcttctagccatttccgtgttcgtttgaatgccacatcgacgtcaaagataggggagtagttgaaatctagttctgcattgttggtacgcacctcaaatgtagtgttggatatcttcaacgtatagttgttgagtagtgatggttttctaaatagaattctcttcatatcattcttgcacgcgtacatttttagcatccatcttggaatcctagatccttgttctattcccaatggtttcatcaatagaagattaaacatatcgtacgaacacgatggagagtaatcgtagcaaaagtaagcatttcctttaatcttagatcccggatactggatatattttgcagccaacacgtgcatccatgcagcatttcctacatatacccggctatgcaccgcgtcatcatcgactgtacgatacataatgttaccgtgttgcttacattgctcgtaaaagactttcatcaatttgtctccttctccgtaaattccagtgggtcttaggcaacaagtatacaattttgctccattcatgattacggaattattggctttcataaccagttgctcggccatacgtttactttttgcgtatacatgtcctggtgatatatcataaagggtatgctcatggccgatgaatggatcaccgtgtttattgggtcctattgcttccatgctactagtatagatcaaatacttgattcctaggtccacacaagctgccaaaatagtctgtgttccataatagtttactttcatgatttcattatcggtgtattttccaaatacatccactagagcagccgtatgaataatcagatttaccccatctagcgcttctctcaccttatcaaagtcgtttatatcacattgtatatagtttataaccttaactttcgaggttattggttgtggatcttctacaatatctatgactctgatttcttgaacatcatctgcactaattaacagttttactatatacctgcctagaaatccggcaccaccagtaaccgcgtacacggccattgctgccactcataatatcagactacttattctattttactaaataatggctgtttgtataatagaccacgataatatcagaggagttatttactttgaaccagtccatggaaaagataaagttttaggatcagttattggattaaaatccggaacgtatagtttgataattcatcgttacggagatattagtcaaggatgtgattccataggcagtccagaaatatttatcggtaacatctttgtaaacagatatggtgtagcatatgtttatttagatacagatgtaaatatatttacaattattggaaaggcgttatctatttcaaaaaatgatcagagattagcgtgtggagttattggtatttcttacataaatgaaaagataatacattttcttacaattaacgagaatggcgtttgatatatcagttaatgcgtctaaaacaataaatgcattagtttacttttctactcagcaaaataaattagtcatacgtaatgaagttaatgatacacactacactgtcgaatttgatagggacaaagtagttgacacgtttatttcatataatagacataatgacaccatagagataagaggggtgcttccagaggaaactaatattggttgcgcggttagtatgacttacttgtataataagtatagttttaaactgattttagcagaatatataagacacagaaatactatatccggcaatatttattcggcattgatgacactagatgatttggctattaaacagtatggagacattgatctattatttaatgagaaacttaaagtagactccgattcgggactatttgactttgtcaactttgtaaaggatatgatatgttgtgattctagaatagtagtagctctatctagtctagtatctaaacattgggaattgacaaataaaaaatataggtgtatggcattagccgaacatatatctgatagtattccaatatctgagctatctagactacgatacaatctatgtaagtatctacgcggacacactgagagcatagaggataaatttgattattttgaagacgatgattcgtctacatgttctgccgtaaccgacagggaaacggatgtataattttttttatagcgtgaaggatatgataaaaaatataattgttgtatttatcccattccaatcaccttatatgattctgtaacacaataaaggagtcttatagatgtatagaggtcagatactggtttgataaactgtttattccacataagtatgtttgactttatggttagacccgcatactttaacaaatcactgaaaattggagttaggtattgacctctcagaatcagttgccgttctggaacattaaatgtattttttatgatatactccaacgcatttatgtgggcatacaacaagtcattactaatggaatattccaagagttttagttgtctagtatttaacaagagaagagatttcaacagactgtttatgaactcgaatgccgcctcattgtcgcttatattgatgatgtcgaattctcccaatatcatcaccgatgagtagctcatcttgttatcgggatccaagttttctaaagatgtcattaaaccctcgatcatgaatggatttatcatcatcgtttttatgttggacatgagcttagtccgtttgtccacatctatagaagatgatttctgaattatttcatatatctctctctttaactccaggaacttgtcaggatggtctactttaatatgttctcgtctaagagatgaaaatctttggatggttgcacgcgacttttctctaaaggatgacgttgcccaagatcctctcttaaatgaatccatcttatccttggacaagatggacagtctattttccttagatggtttaatatttttgttacccatgatctataaaggtagacctaatcgtctcggatgaccatatatttattttcagttttattatacgcataaattgtaaaaaatatgttaggtttacgaaaatgtctcgtggggcattaatcgtttttgaaggattggacaaatctggaaaaacaacacaatgtatgaacatcatggaatcaataccttcaaacacaataaaataccttaactttcctcagagatccactgtcactggaaagatgatagatgactatctaactcgtaaaaaaacctataatgatcatatagttaatctattattttgtgcaaatagatgggagtttgcatcttttatacaagaacaactagaacagggaattactttaatagttgatagatacgcattttctggagtagcgtatgccgccgctaaaggcgcgtcaatgactctcagtaagagttatgaatctggattgcctaaacccgacttagttatattcttggaatctggtagcaaagaaattaatagaaacgtcggtgaggaaatttatgaagatgttacattccaacaaaaggtattacaagaatataaaaaaatgattgaagaaggagatattcattggcaaattatttcttctgaattcgaggaagatgtaaagaaggagttgattaagaatatagttatagaggctatacacacggttactggaccagtggggcaactgtggatgtaatagtgaaattacattttttataaatagatgttagtacagtgttataaatggatgaagcatattactctggcaacttggaatcagtactcggatacgtgtccgatatgcataccgaactcgcatcaatatctcaattagttattgccaagatagaaactatagataatgatatattaaacaaggacattgtaaattttatcatgtgtagatcaaacttggataatccatttatctctttcctagatactgtatatactattatagatcaagagaactatcagactgagttgattaattcattagacgacaatgaaattatcgattgtatagttaataagtttatgagcttttataaggataacctagaaaatatagtagatgctatcattactctaaaatatataatgaataatccagattttaaaactacgtatgccgaagtactcggttccagaatagccgatatagatattaaacaagtgatacgtaagaatatactacaattgtctaataatatccgcgaacgatatttgtgaaaatattaaaaaaaaatactttttttattaaatgacgtcttttcgtgaatttagaaaattatgctgtgctatatatcacgcatcaggatataaagaaaaatctaaattaattagagactttataacagatagggatgataaatatttgatcattaagctattgcttcccggattagacgatagaatttataacatgaacgataaacaaattataaaattatatagtataatatttaaacaatctcaggaagatatgctacaagatttaggatacggatatataggagacactattaggactttcttcaaagagaacacagaaatccgtccacgagataaaagcattttaactttagaagaagtggatagttttttaactacgttatcatccgtaactaaagaatcgcatcaaataaaattattgactgatgtagcatctgtttgtacatgtaatgatttaaaatgtgtagtcatgcttattgataaagatctaaaaattaaagcgggtcctcggtacgtacttaacgctattagtcctaatgcctatgatgtgtttagaaaatctaataacttgaaagagataatagaaaattcatctaaacaaaatctagactctatatctatttctgttatgactccaattaatcccatgttagcggaatcgtgtgattctgtcaataaggcgtttaaaaaatttccatcaggaatgtttgcggaagtcaaatacgatggtgaaagagtacaagttcataaaaataataacgagtttgccttctttagtagaaacatgaaaccagtactctctcataaagtggattatctcaaagaatacataccgaaagcatttaaaaaagctacgtctatcgtattggattctgaaattgttcttgtagacgaacataatgtaccgctcccgtttggaagtttaggtatacacaaaaagaaagaatataaaaactctaacatgtgtttgttcgtgtttgactgtttgtactttgatggattcgatatgacggacattccattgtacgaacgaagatcttttctcaaagatgttatggttgaaatacccaatagaatagtattctcagagttgacgaatattagtaacgagtctcagttaactgacgtattggatgatgcactaacgagaaaattagaaggattggtcttaaaagatattaatggagtatacgaaccgggaaagagaagatggttaaaaataaagcgagactatttgaacgagggttccatggcagattctgccgatttagtagtactaggtgcctactatggtaaaggagcaaagggtggtatcatggcagtctttctaatgggttgttacgacgatgaatccggtaaatggaagacggttaccaagtgttcaggacacgatgataatacgttaagggagttgcaagaccaattaaagatgattaaaattaacaaggatcccaaaaaaattccagagtggttagtagttaataaaatctatattcccgattttgtagtagaggatccgaaacaatctcagatatgggaaatttcaggagcagagtttacatcttccaagtcccataccgcaaatggaatatccattagatttcctagatttactaggataagagaggataaaacgtggaaagaatctactcatctaaacgatttagtaaacttgactaaatcttaatagttacatacaaactgaaaattaaaataacactatttagttggtggtcgccatggatggtgttattgtatactgtctaaacgcgctagtaaaacatggcgaggaaataaatcatataaaaaatgatttcatgattaaaccatgttgtgaaagagtttgtgaaaaagtcaagaacgttcacattggcggacaatctaaaaacaatacagtgattgcagatttgccatatatggataatgcggtatccgatgtatgcaattcactgtataaaaagaatgtatcaagaatatccagatttgctaatttgataaagatagatgacgatgacaagactcctactggtgtatataattattttaaacctaaagatgccattcctgttatcatatctataggaaaggataaagatgtctgtgaactattaatctcatcagacatatcgtgtgcatgcgtggagttaaattcatatcacgtagccattcttcccatggatgtttccttttttaccaaaggaaatgcatcattgattattctcctgtttgatttctctatcgatgcggcacctctcttaagaagtgtaaccgataataatgttattatatctagacaccagcgtctacatgacgagcttccgagttccaattggttcaagttttacataagtataaagtccgactattgttctatattatatatggttgttgatggatctgtgatgcatgcgatagctgataatagaactcacgcaattattagcaaaaatatattagacaatactacgattaacgatgagtgtagatgctgttattttgaaccacagattaggattcttgatagagatgagatgctcaatggatcatcgtgtgatatgaacagacattgtattatgatgaatttacctgatgtaggcgaatttggatctagtatgttggggaaatatgaacctgacatgattaagattgctctttcggtggctggtaatttaataagaaatcgagactacattcccgggagacgaggatatagctactacgtttacggtatagcctctagataatttttttaagcacgaaataaaaaacataattttaaaccaatctatttcatactattttgtgtgatcaccatggacataaagatagatattagtatttctggtgataaatttacggtgactactaggagggaaaatgaagaaagaaaaaaatatctacctctccaaaaagaaaaaactactgatgttatcaaacctgattatcttgagtacgatgacttgttagatagagatgagatgtttactattctagaggaatattttatgtacagaggtctattaggcctcagaataaaatatggacgactctttaacgaaattaaaaaattcgacaatgatgcggaagaacaattcggtactatagaagaactcaagcagaaacttagattaaattctgaagagggagcagataactttatagattatataaaggtacaaaaacaggatatcgtcaaacttactgtatacgattgcatatctatgataggattgtgtgcatgcgtggtagatgtttggagaaatgagaaactgttttctagatggaaatattgtttacgagcgattaaactgtttattgatgatcacatgcttgataagataaaatctatactgcagaatagactagtatatgtggaaatgtcatagaaagttaaaagttaatgagagcaaaaatatataaggttgtattccatatttgttatttttttctgtaatagttagaaaaatacattcgatggtctatctatcagattattatgtgttataaggtactttttctcataataaactagagtatgagtaagatagtgtttttcaaaacatataaatctaaaattgatggatgagatatacagctattaatttcgaaaatatattttaatctgataactttaaacatggatttttaatggtggtttaacgttttaaaaaaagattttgttattgtagtatatgataatattaaaagatggatataaagaatttgctgactgcatgtactattttttacattactacattggctacggcagatatacctacttcgtcactgccacacgctccggtaaacggggcatgtgacgagggagaatatcttgataagaggcataatcaatgttgtaatcagtgtccacctggagaatttgccaaggttagatgtaatggtaacgataacacaaaatgtgaacgctgcccacctcatacatataccgcaatccccaattactctaatggatgtcatcaatgtagaaaatgcccaacaggatcatttgataaggtaaagtgtaccggaacacagaacagtaaatgttcgtgtcttcctggttggtattgcgctactgattcttcacagactgaagattgtcgagattgtataccaaaaaggagatgtccatgcggatactttggtggaatagatgaacaaggaaatcctatttgtaaatcgtgttgtgttggtgaatattgcgactacctacgtaattatagacttgatccatttcctccatgcaaactatctaaatgtaattaattatgattttgatgataatgttaccatacattatatcgctacttggttagtgtattattcagtatgaagacctattaataattacttatcttttgacgatcttgttataattataatataaaaatacttatggcatagtaactcataattgctgacgcgataaattcgtaataatctgttttgttcaaatttttataaggaatctacaggcataaaaataaaaatataatttataatatactcttacagcgcgccatcatgaataacagcagtgaattgattgctgttattaatggatttagaaatagtggacgattttgtgatattaatatagttattaatgatgaaaggataaacgctcacagactcatcctatctggagcctccgaatatttttccattctgttttccaataattttatcgattctaatgaatacgaagttaatctaagtcatttagattatcaaagtgttaacgatttgatcgattacatttatgggatacctttgagcctaactaacgataacgtgaaatatattctttcaaccgctgattttttacaaattggatctgctattacggagtgtgaaaattacatacttaaaaatctttgttctagaaactgtatcgatttctacatatacgctgataaatataataacaagaaaatagaatcagcgtcgtttaacacaatattacaaaatattttgagactcatcaacgatgaaaactttaaatacttaacagaggaatcaatgataaaaattttaagcgatgatatgttaaatataaaaaatgaggatttcgccccactaattctcattaaatggttagagagtactcaacaaccatgcaccgtcgagttacttaaatgcctcagaatatcattgctttccccacaagttataaaatcactttatagtcatcgactggttagttcaatctacgaatgtataacattcttaaacaatatagcattcttggatgaatcatttcctagataccatagcatcgagttgatatctatcggtataagtaattcgcatgataagatttccataaactgctacaatcataaaaaaaatacatgggaaatgatatcttcacgtagatataggtgtagtttcgcagtggccgtcctggataatattatctatatgatgggtggatatgatcagtccccgtatagaagttcaaaggttatagcgtacaatacatgtacaaattcttggatatatgatataccagagctaaaatatcctcgttctaattgtgggggactggctgatgacgaatacatttattgtataggcggcatacgcgatcaggattcatcgttgacatctagtattgatagatggaagccatcaaaaccatattggcagaagtatgctaaaatgcgcgaaccaaaatgtgatatgggggttgcgatgttaaacggattaatatatgttataggtggaatcgttaaaggtgacacgtgtaccgacgcactagagagtttatcagaagatggatggatgaagcatcaacgtcttccaataaaaatgtccaatatgtcgacgattgttcatgatggcaagatttatatatctggaggttacaacaatagtagtgtagttaatgtaatatcgaatctagtccttagctataattcgatatatgatgaatggaccaaattatcatcattaaacattcctagaattaatcccgctctatggtcagcgcataataaattatatgtaggaggaggaatatctgatgatgttcgaactaatacatctgagacatacgacaaagaaaaagattgttggacattggataatggtcacgtgttaccacgcaattatataatgtataaatgcgaaccgattaaacataaatatccattggaaaaaacacagtacacgaatgattttctaaagtatttggaaagttttataggtagttgatagaacaaaatacataattttgtaaaaataaatcactttttatactaatatgacacgattaccaatacttttgttactaatatcattagtatacgctacaccttttcctcagacatctaaaaaaataggtgatgatgcaactctatcatgtaatcgaaataatacaaatgactacgttgttatgagtgcttggtataaggagcccaattccattattcttttagctgctaaaagcgacgtcttgtattttgataattataccaaggataaaatatcttacgactctccatacgatgatctagttacaactatcacaattaaatcattgactgctagagatgccggtacttatgtatgtgcattctttatgacatcaactacaaatgacactgataaagtagattatgaagaatactccacagagttgattgtaaatacagatagtgaatcgactatagacataatactatctggatctacacattcaccggaaactagttctaagaaacctgattatatagataattctaattgctcgtcggtattcgaaatcggtacccggggatcagcttgcatgcctgcagcaattcccgaggctgtagccgacgatggtgcgccaggagagttgttgattcattgtttgcctccctgctgcggtttttcaccgaagttcatgccagtccagcgtttttgcagcagaaaagccgccgacttcggtttgcggtcgcgagtgaagatccctttcttgttaccgccaacgcgcaatatgccttgcgaggtcgcaaaatcggcgaaattccatacctgttcaccgacgacggcgctgacgcgatcaaagacgcggtgatacatatccagccatgcacactgatactcttcactccacatgtcggtgtacattgagtgcagcccggctaacgtatccacgccgtattcggtgatgataatcggctgatgcagtttctcctgccaggccagaagttctttttccagtaccttctctgccgtttccaaatcgccgctttggacataccatccgtaataacggttcaggcacagcacatcaaagagatcgctgatggtatcggtgtgagcgtcgcagaacattacattgacgcaggtgatcggacgcgtcgggtcgagtttacgcgttgcttccgccagtggcgcgaaatattcccgtgcaccttgcggacgggtatccggttcgttggcaatactccacatcaccacgcttgggtggtttttgtcacgcgctatcagctctttaatcgcctgtaagtgcgcttgctgagtttccccgttgactgcctcttcgctgtacagttctttcggcttgttgcccgcttcgaaaccaatgcctaaagagaggttaaagccgacagcagcagtttcatcaatcaccacgatgccatgttcatctgcccagtcgagcatctcttcagcgtaagggtaatgcgaggtacggtaggagttggccccaatccagtccattaatgcgtggtcgtgcaccatcagcacgttatcgaatcctttgccacgcaagtccgcatcttcatgacgaccaaagccagtaaagtagaacggtttgtggttaatcaggaactgttcgcccttcactgccactgaccggatgccgacgcgaagcgggtagatatcacactctgtctggcttttggctgtgacgcacagttcatagagataaccttcacccggttgccagaggtgcggattcaccacttgcaaagtcccgctagtgccttgtccagttgcaaccacctgttgatccgcatcacgcagttcaacgctgacatcaccattggccaccacctgccagtcaacagacgcgtggttacagtcttgcgcgacatgcgtcaccacggtgatatcgtccacccaggtgttcggcgtggtgtagagcattacgctgcgatggattccggcatagttaaagaaatcatggaagtaagactgctttttcttgccgttttcgtcggtaatcaccattcccggcgggatagtctgccagttcagttcgttgttcacacaaacggtgatacgtacacttttcccggcaataacatacggcgtgacatcggcttcaaatggcgtatagccgccctgatgctccatcacttcctgattattgacccacactttgccgtaatgagtgaccgcatcgaaacgcagcacgatacgctggcctgcccaacctttcggtataaagacttcgcgctgataccagacgttgcccgcataattacgaatatctgcatcggcgaactgatcgttaaaactgcctggcacagcaattgcccggctttcttgtaacgcgctttcccaccaacgctgatcaattccacagttttcgcgatccagactgaatgcccacaggccgtcgagttttttgatttcacgggttggggtttctacaggacgtaacattctagtcgaggaattcatttatagcatagaaaaaaacaaaatgaaattctactatatttttacatacatatattctaaatatgaaagtggtgattgtgactagcgtagcatcgcttctagacatctatatactatatagtaataccaatactcaagactacgaaactgatacaatctcttatcatgtgggtaatgttctcgatgtcgatagccatatgcccggtagttgcgatatacataaactgatcactaattccaaacccacccgctttttatagtaagtttttcacccataaataataaatacaataattaatttctcgtaaaagtagaaaatatattctaatttattgcacggtaaggaagtagaatcataaagaacagtgacggatccccgatccccgacctgcaggcatgcaagctcgactccggaaccaattactgataatgtagaagatcatacagacaccgtcacatacactagtgatagcattaatacagtaagtgcatcatctggagaatccacaacagacgagactccggaaccaattactgataaagaagatcatacagttacagacactgtctcatacactacagtaagtacatcatctggaattgtcactactaaatcaaccaccgatgatgcggatctttatgatacgtacaatgataatgatacagtaccaccaactactgtaggcggtagtacaacctctattagcaattataaaaccaaggactttgtagaaatatttggtattaccgcattaattatattgtcggccgtggcaattttctgtattacatattatatatataataaacgttcacgtaaatacaaaacagagaacaaagtctagatttttgacttacataaatgtctgggatagtaaaatctatcatattgagcggaccatctggtttaggaaagacagccatagccaaaagactatgggaatatatttggatttgtggtgtcccataccactagatttcctcgtcctatggaacgagaaggtgttgattaccattacgttaacagagaggccatctggaagggaatagccgccggaaactttctagaacatactgagtttttaggaaatatttacggaacttctaaaacagctgtgaatacagcggctattaataatcgtatttgtgtgatggatctaaacatcgacggtgttagaagtcttaaaaatacgtacctaatgccttactcggtgtatataagacctacctctcttaaaatggttgagaccaagcttcgtcgtagaaacactgaagctaacgatgagattcatcgtcgtgtgatgttggcaaaaactgacatggatgaggcaggtgaagccggtctattcgacactattatcattgaagatgatgtgaatttagcatatagtaagttaattcagatactacaggaccgtattagaatgtattttaacactaattagagacttaagacttaaaacttgataattaataatataactcgtttttatatgtgtctatttcaacgtctaatgtattagttaaatattaaaacttaccacgtaaaacttaaaatttaaaatgatatttcattgacagatagatcacacattatgaactttcaaggacttgtgttaactgacaattgcaaaaatcaatgggtcgttggaccattaataggaaaaggtggattcggtagtatttatactactaatgacaataattatgtagtaaaaatagagcccaaagctaacggatcattatttaccgaacaggcattttatactagagtacttaaaccatccgttatcgaagaatggaaaaaatctcacaatataaagcacgtaggtcttatcacgtgcaaggcatttggtctatacaaatccattaatgtggaatatcgattcttggtaattaatagattaggtgcagatctagatgcggtgatcagagccaataataatagactaccaaaaaggtcggtgatgttgatcggaatcgaaatcttaaataccatacaatttatgcacgagcaaggatattctcacggagatattaaagcgagtaatatagtcttagatcaaatagataagaataaattatatctagtggattacggattggtttctaaattcatgtctaatggcgaacatgttccatttataagaaatccaaataaaatggataacggtactctagaatttacacctatagattcgcataaaggatacgttgtatctagacgtggagatctagaaacacttggatattgtatgattagatggttgggaggtatcttaccatggactaagatatctgaaacaaagaattgtgcattagtaagtgccacaaaacagaaatatgttaacaatactgcgactttgttaatgaccagtttgcaatatgcacctagagaattgctgcaatatattaccatggtaaactctttgacatattttgaggaacccaattacgacaagtttcggcacatattaatgcagggtgtatattattaagtgtggtgtttggtcgataaaaattaaaaaataacttaatttattattgatctcgtgtgtacaaccgaaatcatggcgatgttttacgcacacgctctcggtgggtacgacgagaatcttcatgcctttcctggaatatcatcgactgttgccaatgatgtcaggaaatattctgttgtgtcagtttataataacaagtatgacattgtaaaagacaaatatatgtggtgttacagtcaggtgaacaagagatatattggagcactgctgcctatgtttgagtgcaatgaatatctacaaattggaaatccgatccatgatcaagaaggaaatcaaatctctatcatcacatatcgccacaaaaactactatgctctaagcggaatcgggtacgagagtctagacttgtgtttggaaggagtagggattcatcatcacgtacttgaaacaggaaacgctgtatatggaaaagttcaacatgattattctactatcaaagagaaggccaaagaaatgagtgcacttagtccaggacctatcatcgattaccacgtctggataggagattgtatctgtcaagttactgctgtggacgtacatggaaaggaaattatgaaaatgagattcaaaaagggtgcggtgcttccgatcccaaatctggtaaaagttaaacttggggagaatgatacagaaaatctttcttctactatatcggcggcaccatcgaggtaaccacctctctggaagacagcgtgaatcatgtactcatgaaacgtttggaaactatacgccatatgtggtctgttgtatatgatcattttgatattgtgaatggtaaagaatgctgttatgtgcatacgcattcatctaatcaaaatcctataccgagtactgtaaaaacaaatttgtacatgaagactatgggatcatgcattcaaatggattccatggaagctctagagtatcttagcgaactgaaggaatcaggtggatggagtcccagaccagaaatgcaggaatttgaatatccagatggagtggaagacactgaatcaattgagagattggcagaggagttcttcaatagatcagaacttcaggctggtgaatcagtcaaatttggtaattctattaattgttaaacatacatctgtttcagctaagcaactaagaacacgtatacggcagcagcttccttctatactctcatcttttaccaacacaaagggtggatatttgttcattggagttgataataatacacacaaagtatttggattcacggtgggttacgactacctcagactgatagagaatgatatagaaaagcatatcaaaagacttcgtgttgtgcatttctgtgagaagaaagaggacatcaagtacgcgtgtcgattcatcaaggtatataaacctggggatgagactacctcgacatacgtgtgcgctatcaaagtggaaagatgctgttgtgctgtgtttgcagattggccagaatcatggtatatggatactaatggtatcaagaagtattctccagatgaatgggtgtcacatataaaattttaattaatgtaactatagagaacaaataataaggttgtaatatcatatagacaataactaacaattaattagtaactgttatctcttttttaactaaccaactaactatatacctattaatacatcgtaattatagttcttaacatctattaatcattaattcgcttctttaattttttataaactaacattgttaattgaaaagggataacatgttacagaatataaattatatatggatttttttaaaaaggaaatacttgactggagtatatatttatctcttcattatatagcacgcgtgttttccaatttttccacatcccatataatacaggattataatctcgttcgaacatacgagaaagtggataaaacaatagttgattttttatctaggttgccaaatttattccatattttagaatatggggaaaatattctacatatttattctatggatgatgctaatacgaatattataattttttttctagatagagtattaaatattaataagaacgggtcatttatacacaatctcgggttatcatcatccattaatataaaagaatatgtatatcaattagttaataatgatcatccagataataggataagactaatgcttgaaaatggacgtagaacaagacattttttgtcctatatatcagatacagttaatatctatatatgtattttaataaatcatggattttatatagatgccgaagacagttacggttgtacattattacatagatgtatatatcactataagaaatcagaatcagaatcatacaatgaattaattaagatattgttaaataatggatcagatgtagataaaaaagatacgtacggaaacacaccttttatcctattatgtaaacacgatatcaacaacgtggaattgtttgagatatgtttagagaatgctaatatagactctgtagactttaatagatatacacctcttcattatgtctcatgtcgtaataaatatgattttgtaaagttattaatttctaaaggagcaaatgttaatgcgcgtaataaattcggaactactccattttattgtggaattatacacggtatctcgcttataaaactatatttggaatcagacacagagttagaaatagataatgaacatatagttcgtcatttaataatttttgatgctgttgaatctttagattatctattatccagaggagttattgatattaactatcgtactatatacaacgaaacatctatttacgacgctgtcagttataatgcgtataatacgttggtctatctattaaacaaaaatggtgattttgagacgattactactagtggatgtacatgtatttcggaagcagtcgcaaacaacaacaaaataataatggaagtactattgtctaaacgaccatctttgaaaattatgatacagtctatgatagcaattactaaacataaacagcataatgcagatttattgaaaatgtgtataaaatatactgcgtgtatgaccgattatgatactcttatagatgtacagtcgctacagcaatataaatggtatattttaagatgtttcgatgaaatagatatcatgaagagatgttatataaaaaataaaactgtattccaattagttttttgtatcaaagacattaatactttaatgagatacggtaaacatccttctttcgtgaaatgcactagtctcgacgtatacggaagtcgtgtacgtaatatcatagcatctattagatatcgtcagagattaattagtctattatccaagaagctggatcctggagataaatggtcgtgttttcctaacgaaataaaatataaaatattggaaaactttaacgataacgaactatccacatatctaaaaatcttataaacattattaaaatataaaatctaagtaggataaaatcacactacatcattgtttccttttagtgctcgacagtgtatactatttttaacgctcataaataaaaatgaaaacgatttccgttgttacgttgttatgcgtactacctgctgttgtttattcaacatgtactgtacccactatgaataacgctaaattaacgtctaccgaaacatcgtttaatgataaccagaaagttacgtttacatgtgatcagggatatcattctttggatccaaatgctgtctgtgaaacagataaatggaaatacgaaaatccatgcaaaaaaatgtgcacagtttctgattatgtctctgaactatataataaaccgctatacgaagtgaattccaccatgacactaagttgcaacggcgaaacaaaatattttcgttgcgaagaaaaaaatggaaatacttcttggaatgatactgttacgtgtcctaatgcggaatgtcaacctcttcaattagaacacggatcgtgtcaaccagttaaagaaaaatactcatttggggaatatatgactatcaactgtgatgttggatatgaggttattggtgcttcgtacataagttgtacagctaattcttggaatgttattccatcatgtcaacaaaaatgtgatatgccgtctctatctaacggattaatttccggatctacattttctatcggtggcgttatacatcttagttgtaaaagtggttttacactaacggggtctccatcatccacatgtatcgacggtaaatggaatcccatactcccaatatgtgtacgaactaacgaaaaatttgatccagtggatgatggtcccgacgatgagacagatttgagcaaactctcgaaagacgttgtacaatatgaacaagaaatagaatcgttagaagcaacttatcatataatcatagtggcgttgacaattatgggcgtcatatttttaatctccgttatagtattagtttgttcctgtgacaaaaataatgaccaatataagttccataaattgctaccgtaaatataaatccgttaaaataattaataatttaataacaaacaagtatcaaaagattaaagacttatagctagaatcaattgagatgtcttcttcagtggatgttgatatctacgatgccgttagagcatttttactcaggcactattataacaagagatttattgtgtatggaagaagtaacgccatattacataatatatacaggctatttacaagatgcgccgttataccgttcgatgatatagtacgtactatgccaaatgaatcacgtgttaaacaatgggtgatggatacacttaatggtataatgatgaatgaacgcgatgtttctgtaagcgttggcaccggaatactattcatggaaatgtttttcgattacaataaaaatagtatcaacaatcaactaatgtatgatataattaatagcgtatctataattctagctaatgagagatatagaagcgcttttaacgacgatggtatatacatccgtagaaatatgattaacaagttgtacggatacgcatctctaactactattggcacgatcgctggaggtgtttgttattatctgttgatgcatctagttagtttgtataaataattatttcaatatactagttaaaattttaagattttaaatgtataaaaaactaataacgtttttatttgtaataggtgcattagcatcctattcgaataatgagtacactccgtttaataaactgagtgtaaaactctatatagatggagtagataatatagaaaattcatatactgatgataataatgaattggtgttaaattttaaagagtacacaatttctattattacagagtcatgcgacgtcggatttgattccatagatatagatgttataaacgactataaaattattgatatgtataccattgactcgtctactattcaacgcagaggtcacacgtgtagaatatctaccaaattatcatgccattatgataagtacccttatattcacaaatatgatggtgatgagcgacaatattctattactgcagagggaaaatgctataaaggaataaaatatgaaataagtatgatcaacgatgatactctattgagaaaacatactcttaaaattggatctacttatatatttgatcgtcatggacatagtaatacatattattcaaaatatgatttttaaaaatttaaaatatattatcacttcagtgacagtagtcaaataacaaacaacaccatgagatatattataattctcgcagttttgttcattaatagtatacatgctaaaataactagttataagtttgaatccgtcaattttgattccaaaattgaatggactggggatggtctatacaatatatcccttaaaaattatggcatcaagacgtggcaaacaatgtatacaaatgtaccagaaggaacatacgacatatccgcatttccaaagaatgatttcgtatctttctgggttaaatttgaacaaggcgattataaagtggaagagtattgtacgggactatgcgtcgaagtaaaaattggaccaccgactgtaacattgactgaatacgacgaccatatcaatttgtacatcgagcatccgtatgctactagaggtagcaaaaagattcctatttacaaacgcggtgacatgtgtgatatctacttgttgtatacggctaacttcacattcggagattctaaagaaccagtaccatatgatatcgatgactacgattgcacgtctacaggttgcagcatagactttgtcacaacagaaaaagtgtgcgtgacagcacagggagccacagaagggtttctcgaaaaaattactccatggagttcgaaagtatgtctgacacctaaaaagagtgtatatacatgcgcaattagatccaaagaagatgttcccaatttcaaggacaaaatggccagagttatcaagagaaaatttaatacacagtctcaatcttatttaactaaatttctcggtagcacatcaaatgatgttaccacttttcttagcatgcttaacttgactaaatattcataactaatttttattaatgatacaaaaacgaaataaaactgcatattatacactggttaacgcccttataggctctaaccattttcaagatgaggtccctgattatagtccttctgttcccctctatcatctactccatgtctattagacgatgtgagaagactgaagaggaaacatggggattgaaaatagggttgtgtataattgccaaagatttctatcccgaaagaactgattgcagtgttcatctcccaactgcaagtgaaggattgataactgaaggcaatggattcagggatatacgaaacaccgataaattataaaaaaagcaatgtgtccgctgtttccgttaataatactattttcgtaactggcggattattcataaataactctaatagcacgatcgtggttaacaatatggaaaaacttgacatttataaagacaaacaatggtcgattatagaaatgcctatggctagggtatatcacggcattgactcgacatttggaatgttatattttgccggaggtctatccgttaccgaacaatatggtaatttagagaaaaacaacgagatatcttgttacaatcctagaacgaataagtggtttgatatttcatatactatttataagatatccatatcatcattgtgtaaactaaataacgtcttctatgtatttagtaaggacattggatatgtggaaaagtatgatggtgcatggaagttagtacatgatcgtctccccgctataaaggcattatcaacttctccttattgattgaaaatgaaaatataaatagtttttatgtatagcagtattaccctatagttttattgcttactactaacatggatacagatgttacaaatgtagaagatatcataaatgaaatagatagagagaaagaagaaatactaaaaaatgtagaaattgaaaataataaaaacattaacaagaatcatcccaatgaatatattagagaagcactcgttattaataccagtagtaatagtgattccattgataaagaagttatagaatgtatcagtcacgatgtaggaatatagatcatatctactaatttttataatcgatacaaaacataaaaaacaactcgttattacatagcaggcatggaatccttcaagtattgttttgataacgatggcaagaaatggattatcggaaatactttatattctggtaattcaatactctataaggtcagaaaaaatttcactagttcgttctacaattacgtaatgaagatagatcacaaatcacacaagccattgttgtctgaaatacgattctatatatctgtattggatcctttgactatcgacaactggacacgggaacgtggtataaagtatttggctattccagatctgtatggaattggagaaaccgatgattatatgttcttcgttataaagaattcgggaagagtattcgccccaaaggatactgaatcagtcttcgaagcatgcgtcactatgataaacacgttagagtttatacactctcgaggatttacccatggaaaaatagaaccgaggaatatactgattagaaataaacgtctttcactaattgactattctagaactaacaaactatacaagagtggaaactcacatatagattacaacgaggacatgataacttcaggaaatatcaattatatgtgtgtagacaatcatcttggagcaacagtttcaagacgaggagatttagaaatgttgggatattgcatgatagaatggttcggtggcaaacttccatggaaaaacgaaagtagtataaaagtaataaaacaaaaaaaagaatataaaaaatttatagctactttctttgaggactgttttcctgaaggaaatgaacctctggaattagttagatatatagaattagtatacacgttagattattctcaaactcctaattatgacagactacgtaaactgtttatacaagattgaaattatattcttttttttatagagtgtggtagtgttacggatatctaatattaatattagactatctctatcgcgctacacgaccaatatcgattactatggatatcttctatgaaaggagagaatgtatttatttctccagcgtcaatctcgtcagtattgacaatactgtattatggagctaatggatccactgctgaacagctatcaaaatatgtagaaacggaggagaacacggataaggttagcgctcagaatatctcattcaaatccatgaataaagtatatgggcgatattctgccgtgtttaaagattcctttttgagaaaaattggcgataagtttcaaactgttgacttcactgattgtcgcactatagatgcaatcaacaagtgtgtagatatctttactgaggggaaaatcaatccactattggatgaaccattgtctcctagcaattagtgccgtatactttaaagcaaaatggttgacgccattcgaaaaggaatttaccagtgattatcccttttacgtatctccgacggaaatggtagacgtaagtatgatgtctatgtacggcaaggcatttaatcacgcatctgtaaaagaatcattcggcaacttttcaatcatagaactgccatatgttggagatactagtatgatggtcattcttccagacaagattgatggattagaatccatagaacaaaatctaacagatacaaattttaagaaatggtgtgactttatggatgctatgtttatagatgttcacattcccaagtttaaggtaacaggctcgtataatctggtggatactctagtaaagtcaggactgacagaggtgttcggttcaactggagattatagcaatatgtgtaatttagatgtgagtgtcgacgctatgatccacaaaacgtatatagatgtcaatgaagagtatacagaagcagctgcagcaacttctgtactagtggcagactgtgcatcaacaattacaaatgagttctgtgcagatcatccgttcatctatgtgattaggcatgttgatggaaaaattcttttcgttggtagatattgctctccgacaactaattgttaaccattttttttaaaaaaaatagaaaaaacatgtggtattagtgcaggtcgttgttcttccaattgcaattggtaagatgacggccaactttagtacccacgtcttttcaccacagcactgtggatgtgacagactgaccagtattgatgacgtcaaacaatgtttgactgaatatatttattggtcgtcctatgcataccgcaacaggcaatgcgctggacaattgtattccacactcctctcttttagagatgatgcggaattagtgttcatcgacattcgcgagctggtaaaaaatatgccgtgggatgatgtcaaagattgtacagaaatcatccgttgttatataccggatgagcaaaaaaccatcagagagatttcggccatcatcggactttgtgcatatgctgctacttactggggaggtgaagaccatcccactagtaacagtctgaacgcattgtttgtgatgcttgagatgctaaattacgtggattataacatcatattccggcgtatgaattgatgagttgtacatcttgacattttctttcttctcttctccctttcttctcttctcccttcctccctcttctccctttcccagaaacaaacttttttacccactataaaataaaatgagtatactacctattatatttcttcctatatttttttattcttcattcgttcagacttttaacgcgtctgaatgtatcgacaaagggcaatattttgcatcattcatggagttagaaaacgagccagtaatcttaccatgtcctcaaataaatacgctatcatccggatataatatattagatattttatgggaaaaacgaggagcggataatgatagaattataccgatagataatggtagcaatatgctaattctgaacccgacacaatcagactctggtatttatatatgcattaccacgaacgaaacctactgtgacatgatgtcgttaaatttgacaatcgtgtctgtctcagaatcaaatatagatcttatctcgtatccacaaatagtaaatgagagatctactggcgaaatggtatgtcccaatattaatgcatttattgctagtaacgtaaacgcagatattatatggagcggacatcgacgccttagaaataagagacttaaacaacggacacctggaattattaccatagaagatgttagaaaaaatgatgctggttattatacatgtgttttagaatatatatacggtggcaaaacatataacgtaaccagaattgtaaaattagaggtacgggatagaataataccttctactatgcaattaccagatggcattgtaacttcaataggtagtaatttgactattgcatgcagagtatcgttgagacctcccacaacggacaccgacgtcttttggataagtaatggtatgtattacgaagaagatgatggggacggaaacggtagaataagtgtagcaaataaaatctatatgaccgataagagacgtgttattacatcccggttaaacattaatcctgtcaaggaagaagatgctacaacgtttacgtgtatggcgtttactattcctagcatcagcaaaacagttactgttagtataacgtgaatgtatgttgttacatttccatgtcaattgagtttataagaatttttatacattatcttccaacaaacaattgacgaacgtattgctatgattaactcccacgatactatgcatattattaatcattaacttgcagactatacctagtgctattttgacatactcgtgttcttgtgtaattgcggtatctatattattaaagtacgtaaatctagctatagttttattatttaattttagataatataccgtctccttatttttaaaaattgccacatcctttattaaatcatgaatgggaatttctatgtcatcgttagtatattgtgaacaacaagagcagatatctataggaaagggtggaatgcgatacattgatctatgtagttttaaaacacacgcgaactttgaagaatttatataaatcattccatcgatacatccttctatgttgacatgtatatatccaggaattcttttattaatgtcaggaaatgtataaactaaaacattgcccgaaagcggtgcctctatctgcgttatatccgttcttaacttacaaaatgtaaccaatacctttgcatgacttgttttgttcggcaacgttagtttaaacttgacgaatggattaattacaatagcatgatccgcgcatctattaagtttttttactttaacgcccttgtatgtttttacagagactttatctaaatttctagtgcttgtatgtgttataaatataacgggatatagaaccgaatcacctaccttagatacccaattacattttatcagatccagataataaacaaattttgtcgccctaactaattctatattgttatatattttacaattggttatgatatcatgtaataacttggagtctaacgcgcatcgtcgtacgtttatacaattgtgatttagtgtagtatatctacacatgtatttttccgcactatagtattctggactagtgataaaactatcgttatatctgtcttcaatgaactcatcgagatattgctctctgtcatattcatacacctgcataaactttctagacatcttacaatccgtgttattttaggatcatatttacatatttacgggtatatcaaagatgttagattagttaatgggaatcgtctataataatgaatattaaacaattatatgaggacttttaccacaaagcatcataaaaatgagtcgtcgtctgatttatgttttaaatatcaaccgcaaatcaactcataaaatacaagagaatgaaatatatacatattttagtcattgcaatatagaccatacttctacagaacttgattttgtagttaaaaactatgatctaaacagacgacaacctgtaactgggtatactgcactacactgctatttgtataataattactttacaaacgatgtactgaagatattattaaatcatgacgtaaatgtaacgatgaaaaccagtagcggacgtatgcctgtttatatattgcttactagatgttgtaatatttcacatgatgtagtgatagatatgatagacaaagataaaaaccacttattacatagagactattccaacctattactagagtatataaaatctcgttacatgttattgaaggaagaggatatcgatgagaacatagtatccactttattagataagggaatcgatcctaactttaaacaagacggatatacagcgttacattattattatttgtgtctcgcacacgtttataaactaggtgagtgtagaaaaccgataacgataaaaaaggccaagcgaattatttctttgtttatacaacatggagctaatctaaacgcgttagataattgtggtaatacaccattccatttgtatcttagtattgaaatgtgtaataatattcatatgactaaaatgctgttgacttttaatccgaatttcaaaatatgtaataatcatggattaacgcctatactatgttatataacttccgactacatacaacacgatattcttgttatgttaatacatcactatgaaacaaatgttggagaaatgccgatagatgagcgtcgtatgatcgtattcgagtttatcaaaacatattctacacgtccggcagattcgataacttatttgatgaataggtttaaaaatataaatatttatacccgctatgaaggaaagacattattacacgtagcatgtgaatataataatacacaagtaatagattatcttatacgtatcaacggagatataaatgcgttaaccgacaataacaaacacgctacacaactcattatagataacaaagaaaattccccatataccattaattgtttactgtatatacttagatatattgtagataagaatgtgataagatcgttggtggatcaacttccatctctacctatcttcgatataaaatcatttgagaaattcatatcctactgtatacttttagatgacacattttacgataggcacgttaagaatcgcgattctaaaacgtatcgatacgcattttcaaaatacatgtcgtttgataaatacgatggtataataactaaatgtcacgacgaaacaatgttactcaaactgtccactgttctagacactacactatatgcagttttaagatgtcataattcgagaaagttaagaagatacctcaacgagttaaaaaaatataataacgataagtcctttaaaatatattctaatattatgaatgagagataccttaatgtatattataaagatatgtacgtgtcaaaggtatatgataaactatttcctgttttcacagataaaaattgtctactaacattactaccttcagaaattatatacgaaatattatacatgctgacaattaacgatctttataatatatcgtatccacctaccaaagtatagttgtatttttctcatgcgatgtgtgtaaaaaaactgatattatataaatattttagtgccgtataataaagatgacgatgaaaatgatggtacatatatatttcgtatcattattgttattgctattccacagttacgccatagacatcgaaaatgaaatcacagaattcttcaataaaatgagagatactctaccagctaaagactctaaatggttgaatccagcatgtatgttcggaggcacaatgaatgatatagccgctctaggagagccattcagcgcaaagtgtcctcctattgaagacagtcttttatcgcacagatataaagactatgtggttaaatgggagaggctagaaaagaatagacggcgacaggtttctaataaacgtgttaaacatggtgatttatggatagccaactatacatctaaattcagtaaccgtaggtatttgtgcaccgtaactacaaagaatggtgactgtgttcagggtatagttagatctcatattaaaaaacctccttcatgcattccaaaaacatatgaactaggtactcatgataagtatggcatagacttatactgtggaattctttacgcaaaacattataataatataacttggtataaagataataaggaaattaatatcgacgacattaagtattcacaaacgggaaaggaattaattattcataatccagagttagaagatagcggaagatacgactgttacgttcattacgacgacgttagaatcaagaatgatatcgtagtatcaagatgtaaaatacttacggttataccgtcacaagaccacaggtttaaactaatactagatccgaaaatcaacgtaacgataggagaacctgccaatataacatgcactgctgtgtcaacgtcattattgatcgacgatgtactgattgaatgggaaaatccatccggatggcttataggattcgattttgatgtatactctgttttaactagtagaggcggtatcaccgaggcgaccttgtactttgaaaatgttactgaagaatatataggtaatacatataaatgtcgtggacacaactattattttgaaaaaacccttacaactacagtagtattggagtaaatatacaatgcatttttatatacattactgaattattattactgaattattattactgaattattattaattatatcgtatttgtgctatagaatggatgaagatacgcgactatctaggtatttgtatctcaccgatagagaacatataaatgtagactctattaaacagttgtgtaaaatatcagatcctaatgcatgttatagatgtggatgtacggctttacatgagtacttttataattatagatcagtcaacggaaaatacaagtatagatacaacggttactatcaatattattcatctagcgattatgaaaattataatgaatattattatgatagaactggtatgaacagtgagagtgataatatatcaatcaaaacagaatatgaattctatgatgaaacacaagatcaaagtacacaactagtaggttacgacattaaactcaaaaccaatgaggatgattttatggctatgatagatcagtgggtgtccatgattatatagatgaatcaattaataaagtagtatatggaagagagtctcacgtaagatggcgggatatatggcaagaacataatgatggcgtatacagtataggaaaggagtgcatagataatatatacgaagacaaccataccgtagacgaattctacaagatagacagcgtatcagatgtagatgacgcggaacacatatctccgataactaaaaaaccatagaatcagttgatgataatacctacatttctaatcttccgtataccatcaaatacaaaatattcgagcaacaataagtattttttatacctttaaaactgataaataaattttttctagtgatattttggcaagatgagaatcctatttctcatcgctttcatgtatgggtgtgttcactcatatgttaacgcggttgaaaccaaatgtccaaatctagacattgtaacatcttctggagaatttcattgttcaggatgtgtggaacatatgcctgagtttagctatatgtattggttggcaaaggatatgaaatcggacgaggataccaagtttatagaacatctgggtgatggcatcaaagaagatgaaaccgttcgtaccacagatagtggaatcgtcactctacgtaaagtccttcatgtgactgatactaataaatttgataattataggttcacttgtgtcctcgctacgctagatggcatttataaaaagaatgtttgctgaagtagttgtgtgctactatttttatttatgatataatctaatggaattaatttgaattgatatttatccaatactaaagattatattagaatcaaattaatcttttatacgagaaaaaataacgacatacgtcgtcaacaaattaaactttttatttattagttaactagcttatagaacttgctcattgttatgtttctaaaacgggtacggcatataggacaattatccgacgcaccggtttctcttcgtgttctatgccatatattgatgcatgttatgcaaaatatatgagtacacgaatccaataaaccaaagtatctatcgttttgagtaaacaacttcatagcaaattccacattctttttctttacttactctatacacgtcctcgtatttatttagtattttgatgatatccaactcagaaatggttgttgtattattgggtgtatttggagtataggtattattagctatgtaccaatttaccaaccctcttaatattgattgataatcacatcggttatccaattaataactaaattgtagtgtatatatagaccatatatgtttctatttttttgacagttacgtatagtttcagtaagttttgattgttgtattcctgtatctctagataagttagtcatatagtcccttccggcgatacgttttttccaagcccgaaattgattagccaaatgtgtatttatttttgtgatattgatataatatttcggataatgcatactgttagtcttatatcatttggttcatctatgtattgtaatattgttacatgatctatagatgatgtattgattttggcaggatcgaattccatatccgcgactaaacagtgaaaaaaatgtaaatactttttaaattttaaattagtaaaacttttttttattttttatgattccaaaaatactgaatacaaagtcctaaattataaatatggagatcatactaccacaacttattattatgtatacaaggccggtgtaatagatagatatatataattctattacaccggcagacaattaccgaccggtatttgtcgttaccaacataccgtataatatgtaatatacaattccataacccattgacagttgttatacatcaaaattgcaattcttttgattacgatgttataagaatgtagttaattgatgtatgatgttaatgtgtcctctttcctcttataacatcgtaatcaaaaacttttttataatatatacctaataatgtgtcttaatagttctcgtgattcgtcaaacaatcattcttataaaatataataaagcaacgtaaaaacacataaaaataagcgtaactaataagacaatggatatttacgacgataaaggtctacagactattaaactgtttaataatgaatttgattgtataaggaatgacatcagagaattatttaaacatgtaactgattccgatagtatacaacttccgatggaagacaattctgatattatagaaaatatcagaaaaatactatatagacgattaaaaaatgtagaatgtgttgacatcgataacacaataacttttatgaaatacgatccaaatgatgataataagcgtacgtgttctaattgggtacccttaactaataactatatggaatattgtctagtaatatatttggaaacaccgatatgtggaggcaaaataaaattataccaccctacaggaaatataaagtcggataaggatattatgtttgcaaagactctagactttaaatcaacgaaagtgttaactggacgtaaaacaattgccgttctagacatatccgtttcatataatagatcaatgactactattcactacaacgacgacgttgatatagatatacatactgataaaaatggaaaagagttatgttattgttatataacaatagatgatcattacttggttgatgtggaaactataggagttatagtcaatagatctggaaaatgtctgttagtaaataaccatctaggtataggtatcgttaaagataaacgtataagcgatagttttggagatgtatgtatggatacaatatttgacttttctgaagcacgagagttattttcattaactaatgatgataacaggaatatagcatgggacactgataaactagacgatgatacagatatatggactcccgtcacagaagatgattacaaatttctttctagactagtattgtatgcaaaatctcaatcggatactgtatttgactattatgttcttactggtgatacggaaccacccactgtattcattttcaaggtaactagattttactttaatatgccgaaataaaaaatttttgtataatatctagaggtagaggtattgtttagataaatacaaataacatagatacatcgcatacttagcatttttataaatatacataagacatacactttatacatttttgtaaaaatactcataaaaaaatttataaaaattatggcacaaccatatcttgtataggtagtttagttcgtcgagtgaacctataaacagataatagacaacacataataatgcctactaatacaagcataataccgggagatgggatatatgacgttgtagtgtttgggttttctgaacgttgatagtctactaatactacatgctgacatctaatgcctgtataaccatgagagcatctacaatacataccgtcaatatctctagcgtggatacagtcaccgtgtaaacaatatccatctccctctggaccgcataatctgatagctggaatatctgttgtagcgtttgtaatttctggcaatgtcgtttcgatagcgttaccactatcggcgaatgatctgattatcatagcagcgaacaacaacatcagataatttatcaacatttttgatggattctgtgtttatgctgtttctcagtgtgtgtttatgacaagattgggaattttatattattaattcagtaatataaactaataatatattgttaattgtgtaaataatataaaaataacaatacaatattgaatgtgttgctgttaaaaatgtatgtgttaatataatagaataaaataaatgagtatgatcattttagataacgattgattttatcattaccgcttcattcttatattctttgcttacggaacctatatttagaaacatctactaacaattttttatgcttgcattattaatggtatgtaatatgattgattgtgtacgcaataccaatttgttaagtatgaatacggggtacaaacataaattgaaatttaacattatttatttatgatatatatcgttatcgttaggtctataccatggatatctttaaagaactaatcttaaaacaccctgatgaaaatgttttgatttctccagtttccattttatctactttatctattctaaatcatggagcagctggttctacagctgaacaactatcaaaatatatagagaatatgaatgagaatacacccgatgacaataatgatgacatggaggtagatattccgtattgtgcgacactagctaccgcaaataaaatatacggtagcgatagtatcgagttccacgcctccttcctacaaaaaataaaagacgattttcaaactgtaaactttaataatgctaaccaaacaaaggaactaatcaacgaatgggttaagacaatgacaaatggtaaaattaattccttattgactagtccgctatccattaatactcgtatgacagttgttagcgccgtccattttaaagcaatgtggaaatatccattttctaaacatcttacatatacagacaagttttatatttctaagaatatagttaccagcgttgatatgatggtgggtaccgagaataacttgcaatatgtacatattaatgaattattcggaggattctctattatcgatattccatacgagggaaactctagtatggtaattatactaccggacgacatagaaggtatatataacatagaaaaaaatataacagatgaaaaatttaaaaaatggtgtggtatgttatctactaaaagtatagacttgtatatgccaaagtttaaagtggaaatgacagaaccgtataatctggtaccgattttagaaaatttaggacttactaatatattcggatattatgcagattttagcaagatgtgtaatgaaactatcactgtagaaaaatttctacatacgacgtttatagatgttaatgaggagtatacagaagcatcggccgttacaggagtatttacgattaacttttcgatggtatatcgtacgaaggtctacataaaccatccattcatgtacatgattaaagacaccacaggacgtatactttttatagggaaatactgctatccgcaataaatataaacaaatagacttttataaagagtcttcaacgataagtatatcgacatactacttatgctgcgaaagattctgaacgagaacgactatctcaccctcttggatcatatccgcactgctaaatactaaatctccactacactttttatcatcttatgaggaatgattgccttcgtgaaataggaataattagcaccagaatagctatggattattgtggtagagagtgcactattctatgtcgtctactggatgaagatgtgacgtacaaaaaaataaaactagaaattgaaacgtgtcacaacttatcaaaacatatagatagacgaggaaacaatgcgctacattgttacgtctccaataaatgcgatacagacattaagattgttctctcgcggagtcgagagactttgtagaaacaacgaaggattaactccgctaggagtatacagtaagcatagatacgtaaaatctcagattgtgcatctactgatatccagctattcaaattcctctaacgaactcaagtcgaatataaatgatttcgatctgtattcggataatatcgacttacgtctgctaaaatacctaattgtggataaacggatacgtccgtccaagaatacgaattatgcaatcaatggtctcggattggtggatatatacgtaacgacgcctaatccgagaccagaagtattgctatggcttcttaaatcagaatgttacagcaccggttacgtatttcgtacctgtatgtacgacagtgatatgtgtaagaactctcttcattactatatatcgtctcatagagaatctcaatctctatccaaggatgtaattaaatgtttgatcgataacaatgtttccatccatggcagagacgaaggaggatctttacccatccaatactactggtctttctcaaccatagatatagagattgttaaattattattaataaaggatgtggacacgtgtagagtatacgacgtcagccctatattagaggcgtattatctaaacaagcgatttagagtaaccccatataatgtagacatggaaatcgttaatcttcttattgagagacgtcatactcttgtcgacgtaatgcgtagtattacttcgtacgattccagagaatataaccactacatcatcgataacattctaaagagatttagacaacaggatgaatccatcgtacaagccatactgataaactacttacattacggcgatatggtcgttcgatgcatgttagataacggacaacaactatcctctacacgactactttgttaataataatctcgtcgatgtaaacgtcgtaaggtttatcgtggaaaatatggacacgcggctgtaaatcacgtatcgaacaatggccgtctatgtatgtacggtctgatattatcgagatttaataattgcgggtatcactgttatgaaaccatactgatagatgtatttgatatactaagcaagtacatggatgatatagatatgatcgataactctactatattacgcggtcgatgtcaataatatacaatttgcaaagcggttattggaatatggagcgagtatcacgctcgataatcaatacggccatccagaaaagcagttacagaagagaaaacaaaacgaaatcgttgttctacaagatgtctctccctacgacgattactacgtaaaaaagatactagcctactgcctattaagggacgagtcattcgcggaactacatagtaaattctgtttaaacgaggactataaaagtgtatttatgaaaaatatatcattcgataagatagattccatcatcgtgacataagtcgcctcaaagagattcgaatctccgacaccgacctgtatacggtatcacagctatcttaaagccatacattcagacagtcacatttcatttcccatgtacgacgatctcatagaacagtgccatctatcgatggagcgtaaaagtaaactcgtcgacaaagcactcaataaattagagtctaccatcggtcaatctagactatcgtatttgcctccggaaattatgcgcaatatcatctaaacagtatgttgtacggaaagaaccattacaaatattatccatgatagaaagaaaatatctatatgattggagaagtaggaaacaggaacaagacaacgattactacattattaaatcatgaagtccgtattatactcgtatatattgtttctctcatgtataataataaacggaagagatatagcaccgcatgcaccatccgatggaaagtgtaaagacaacgaatacaaacgccataatttgtgtccgggaacatacgcttccagattatgcgatagcaagactaacacacgatgtacgccgtgtggttcgggtaccttcacatctcgcaataatcatttacccgcttgtctaagttgtaacggaagacgcgatcgtgtaacacgactcacaatagaatctgtgaatgctctcccggatattattgtcttctcaaaggatcatccggatgcaaggcatgtgtttcccaaacaaaatgtggaataggatacggagtatccggagacgtcatctgttctccgtgtggtctcggaacatattctcacaccgtctcttccgcagataaatgcgaacccgtacccagaaatacgtttaactatatcgatgtggaaattaacctgtatccagttaacgacacgtcgtgtactcggacgaccactaccggtctcagcgaatccatctcaacgtcggaactaactattactatgaatcataaagactgtaatcccgtatttcgtgatggatacttctccgttcttaataaggtagcgacttcaggtttctttacaggagaaaggtgtgcactctgaatttcgagattaaatgcaataacaaagattcttcctccaaacagttaacgaaagcaaagaatgatactatcatgccgcattcggagacagtaactctagtgggcgacatctatatactatatagtaataccaatactcaagactacgaaactgatacaatctcttatcatgtgggtaatgttctcgatgtcgatagccatatgcccggtagttgcgatatacataaactgatcactaattccaaacccacccactttttatagtaagtttttcacccataaataataaatacaataattaatttctcgtaaaagtagaaaatatattctaatttattgcacggtaaggaagtagaatcataaagaacagtactcaatcaatagcaattatgaaacaatatatcgtcctggcatgcatgtgcctggcggcagctgctatgcctgccagtcttcagcaatcatcctcatcctcctcctcgtgtacggaagaagaaaacaaacatcatatgggaatcgatgttattatcaaagtcacaaagcaagaccaaacaccgaccaatgataagatttgccaatccgtaacggaaattacagagtccgagtcagatccagatcccgaggtggaatcagaagatgattccacatcagtcgaggatgtagatcctcctaccacttattactccatcatcggtggaggtctgagaatgaactttggattcaccaaatgtcctcagattaaatccatctcagaatccgctgatggaaacacagtgaatgctagattgtccagcgtgtccccaggacaaggtaaggactctcccgcgatcactcatgaagaagctcttgctatgatcaaagactgtgaagtgtctatcgacatcagatgtagcgaagaagagaaagacagcgacatcaagacccatccagtactcgggtctaacatctctcataagaaagtgagttacgaagatatcatcggttcaacgatcgtcgatacaaaatgcgtcaagaatctagagtttagcgttcgtatcggagacatgtgcaaggaatcatctgaacttgaggtcaaggatggattcaagtatgtcgacggatcggcatctgaaggtgcaaccgatgatacttcactcatcgattcaacaaaactcaaagcgtgtgtctgaatcgataactctattcatctgaaattggatgagtagggttaatcgaacgattcaggcacaccacgaattaaaaaagtgtaccggacactatattccggtttgcaaaacaaaaatgttcttaactacattcacaaaaagttacctctcgcgacttcttctttttctgtctcaatagtgtgatacgattatgacactattcctattcctattcctatttcctttcagagtatcacaaaaatattaaacctctttctgatggtctcataaaaaaagttttacaaaaatatttttattctctttctctctttgatggtctcataaaaaaagttttacaaaaatatttttattctctttctctctttgatggtctcataaaaaaagttttacaaaaatatttttattctctttctctctttgatggtctcataaaaaaagttttacaaaaatatttttattctctttctctctttgatggtctcataaaaaaagttttacaaaaatatttttattctctttctctctttgatggtctcataaaaaaagttttacaaaaatatttttattctctttctctctttgatggtctcataaaaaaagttttacaaaaatatttttattctctttctctctttgatggtctcataaaaaaagttttacaaaaatatttttattctctttctctctttgatggtctcataaaaaaagttttacaaaaatatttttattctctttctctctttgatggtctcataaaaaaagttttacaaaaatatttttattctctttctctctttgatggtctcataaaaaaagttttacaaaaatatttttattctctttctctctttgatggtctcataaaaaaagttttacaaaaatatttttattctctttctctctttgatggtctcataaaaaagttttacaaaaatatttttattctctttctctctttgatggtctcataaaaaagttttacaaaaatatttttattctctttctctctttgatggtctcataaaaaaagttttacaaaaatatttttattctctttctctctttgatggtctcataa

SEQ ID NO: 217 - DNA, 29 bp, Artificial Sequence
  EFNA1-5 primer
gtcgaccaccatggagttcctctgggccc

SEQ ID NO: 218 - DNA, 27 bp, Artificial Sequence
  EFNA1-3 primer
ttaattaatcacggggtttgcagcagc

SEQ ID NO: 219 - DNA, 6165 bp, Artificial Sequence
  TK-SE-EFNA1
agcgcccaatacgcaaaccgcctctccccgcgcgttggccgattcattaatgcagctggcacgacaggtttcccgactggaaagcgggcagtgagcgcaacgcaattaatgtgagttagctcactcattaggcaccccaggctttacactttatgcttccggctcgtatgttgtgtggaattgtgagcggataacaatttcacacaggaaacagctatgaccatgattacgccaagctttgttacagatggaagggtcaaacttaataaaggatatttgttcgactttgtgattagtttgatgcgattcaaaaaagaatcctctctagctaccaccgcaatagatcctgttagatacatagatcctcgtcgtgatatcgcattttctaacgtgatggatatattaaagtcgaataaagtgaacaataattaattctttattgtcatcatgaacggcggacatattcagttgataatcggccccatgttttcaggtaaaagtacagaattaattagacgagttagacgttatcaaatagctcaatataaatgcgtgactataaaatattctaacgataatagatacggaacgggactatggacgcatgataagaataattttgaagcattggaagcaactaaactatgtgatgtcttggaatcaattacagatttctccgtgataggtatcgatgaaggacagttctttccagacattgtttaattctgtgagcgtatggcaaacggtaccgagctcaaaaattgaaaaactagcgtctttttttgctcgaagtcgaccaccatggagttcctctgggcccctctcttgggtctgtgctgcagtctggccgctgctgatcgccacaccgtcttctggaacagttcaaatcccaagttccggaatgaggactacaccatacatgtgcagctgaatgactacgtggacatcatctgtccgcactatgaagatcactctgtggcagacgctgccatggagcagtacatactgtacctggtggagcatgaggagtaccagctgtgccagccccagtccaaggaccaagtccgctggcagtgcaaccggcccagtgccaagcatggcccggagaagctgtctgagaagttccagcgcttcacacctttcaccctgggcaaggagttcaaagaaggacacagctactactacatctccaaacccatccaccagcatgaagaccgctgcttgaggttgaaggtgactgtcagtggcaaaatcactcacagtcctcaggcccatgacaatccacaggagaagagacttgcagcagatgacccagaggtgcgggttctacatagcatcggtcacagtgctgccccacgcctcttcccacttgcctggactgtgctgctccttccacttctgctgctgcaaaccccgtgattaattaatttttatcgatctaattcaacaatgtctggagagctcggatccttctgtgagcgtatggcaaacgaaggaaaaatagttatagtagccgcactcgatgggacatttcaacgtaaaccgtttaataatattttgaatcttattccattatctgaaatggtggtaaaactaactgctgtgtgtatgaaatgctttaaggaggcttccttttctaaacgattgggtgaggaaaccgagatagagataataggaggtaatgatatgtatcaatcggtgtgtagaaagtgttacgtcggctcataatattatattttttatctaaaaaactaaaaataaacattgattaaattttaatataatacttaaaaatggatgttgtgtcgttagataaaccgtttatgtattttgaggaaattgataatgagttagattacgaaccagaaagtgcaaatgaggtcgcaaaaaaactgccgtatcaaggacagttaaaactattactaggagaattattttttcttagtaagttacagcgacacggtatattagatggtgccaccgtagtgtactagtaacggccgccagtgtgctggaattctagaaaagtagaaaatatattctaatttattgcacgggatgagcgaaaaatacatcgtcacctgggacatgttgcagatccatgcacgtaaactcgcaagccgactgatgccttctgaacaatggaaaggcattattgccgtaagccgtggcggtctggtaccgggtgcgttactggcgcgtgaactgggtattcgtcatgtcgataccgtttgtatttccagctacgatcacgacaaccagcgcgagcttaaagtgctgaaacgcgcagaaggcgatggcgaaggcttcatcgttattgatgacctggtggataccggtggtactgcggttgcgattcgtgaaatgtatccaaaagcgcactttgtcaccatcttcgcaaaaccggctggtcgtccgctggttgatgactatgttgttgatatcccgcaagatacctggattgaacagccgtgggatatgggcgtcgtattcgtcccgccaatctccggtcgctaaggatcagcttggcgtaatcaagccgaattctgcagatatccatcacactggcggccgctcgagcatgcatctagagggcccaattcgccctatagtgagtcgtattacaattcactggccgtcgttttacaacgtcgtgactgggaaaaccctggcgttacccaacttaatcgccttgcagcacatccccctttcgccagctggcgtaatagcgaagaggcccgcaccgatcgcccttcccaacagttgcgcagcctgaatggcgaatggacgcgccctgtagcggcgcattaagcgcggcgggtgtggtggttacgcgcagcgtgaccgctacacttgccagcgccctagcgcccgctcctttcgctttcttcccttcctttctcgccacgttcgccggctttccccgtcaagctctaaatcgggggctccctttagggttccgatttagtgctttacggcacctcgaccccaaaaaacttgattagggtgatggttcacgtagtgggccatcgccctgatagacggtttttcgccctttgacgttggagtccacgttctttaatagtggactcttgttccaaactggaacaacactcaaccctatctcggtctattcttttgatttataagggattttgccgatttcggcctattggttaaaaaatgagctgatttaacaaaaatttaacgcgaattttaacaaaattcagggcgcaagggctgctaaaggaagcggaacacgtagaaagccagtccgcagaaacggtgctgaccccggatgaatgtcagctactgggctatctggacaagggaaaacgcaagcgcaaagagaaagcaggtagcttgcagtgggcttacatggcgatagctagactgggcggttttatggacagcaagcgaaccggaattgccagctggggcgccctctggtaaggttgggaagccctgcaaagtaaactggatggctttcttgccgccaaggatctgatggcgcaggggatcaagatctgatcaagagacaggatgaggatcgtttcgcatgattgaacaagatggattgcacgcaggttctccggccgcttgggtggagaggctattcggctatgactgggcacaacagacaatcggctgctctgatgccgccgtgttccggctgtcagcgcaggggcgcccggttctttttgtcaagaccgacctgtccggtgccctgaatgaactgcaggacgaggcagcgcggctatcgtggctggccacgacgggcgttccttgcgcagctgtgctcgacgttgtcactgaagcgggaagggactggctgctattgggcgaagtgccggggcaggatctcctgtcatcccaccttgctcctgccgagaaagtatccatcatggctgatgcaatgcggcggctgcatacgcttgatccggctacctgcccattcgaccaccaagcgaaacatcgcatcgagcgagcacgtactcggatggaagccggtcttgtcgatcaggatgatctggacgaagagcatcaggggctcgcgccagccgaactgttcgccaggctcaaggcgcgcatgcccgacggcgaggatctcgtcgtgacccatggcgatgcctgcttgccgaatatcatggtggaaaatggccgcttttctggattcatcgactgtggccggctgggtgtggcggaccgctatcaggacatagcgttggctacccgtgatattgctgaagagcttggcggcgaatgggctgaccgcttcctcgtgctttacggtatcgccgctcccgattcgcagcgcatcgccttctatcgccttcttgacgagttcttctgaattgaaaaaggaagagtatgagtattcaacatttccgtgtcgcccttattcccttttttgcggcattttgccttcctgtttttgctcacccagaaacgctggtgaaagtaaaagatgctgaagatcagttgggtgcacgagtgggttacatcgaactggatctcaacagcggtaagatccttgagagttttcgccccgaagaacgttttccaatgatgagcacttttaaagttctgctatgtggcgcggtattatcccgtattgacgccgggcaagagcaactcggtcgccgcatacactattctcagaatgacttggttgagtactcaccagtcacagaaaagcatcttacggatggcatgacagtaagagaattatgcagtgctgccataaccatgagtgataacactgcggccaacttacttctgacaacgatcggaggaccgaaggagctaaccgcttttttgcacaacatgggggatcatgtaactcgccttgatcgttgggaaccggagctgaatgaagccataccaaacgacgagcgtgacaccacgatgcctgtagcaatggcaacaacgttgcgcaaactattaactggcgaactacttactctagcttcccggcaacaattaatagactggatggaggcggataaagttgcaggaccacttctgcgctcggcccttccggctggctggtttattgctgataaatctggagccggtgagcgtgggtctcgcggtatcattgcagcactggggccagatggtaagccctcccgtatcgtagttatctacacgacggggagtcaggcaactatggatgaacgaaatagacagatcgctgagataggtgcctcactgattaagcattggtaactgtcagaccaagtttactcatatatactttagattgatttaaaacttcatttttaatttaaaaggatctaggtgaagatcctttttgataatctcatgaccaaaatcccttaacgtgagttttcgttccactgagcgtcagaccccgtagaaaagatcaaaggatcttcttgagatcctttttttctgcgcgtaatctgctgcttgcaaacaaaaaaaccaccgctaccagcggtggtttgtttgccggatcaagagctaccaactctttttccgaaggtaactggcttcagcagagcgcagataccaaatactgttcttctagtgtagccgtagttaggccaccacttcaagaactctgtagcaccgcctacatacctcgctctgctaatcctgttaccagtggctgctgccagtggcgataagtcgtgtcttaccgggttggactcaagacgatagttaccggataaggcgcagcggtcgggctgaacggggggttcgtgcacacagcccagcttggagcgaacgacctacaccgaactgagatacctacagcgtgagctatgagaaagcgccacgcttcccgaagggagaaaggcggacaggtatccggtaagcggcagggtcggaacaggagagcgcacgagggagcttccagggggaaacgcctggtatctttatagtcctgtcgggtttcgccacctctgacttgagcgtcgatttttgtgatgctcgtcaggggggcggagcctatggaaaaacgccagcaacgcggcctttttacggttcctggccttttgctggccttttgctcacatgttctttcctgcgttatcccctgattctgtggataaccgtattaccgcctttgagtgagctgataccgctcgccgcagccgaacgttgtttaattctgtgagcgtatggcaaacg

SEQ ID NO: 220 - DNA, 32 bp, Artificial Sequence
  FUKW-5 primer
gtcgaccaccatggtgggtgaggatagcgtgc

SEQ ID NO: 221 - DNA, 28 bp, Artificial Sequence
  FUKW-3 primer
ttaattaatcagctgtgccccagtttgc

SEQ ID NO: 222 - DNA, 4632 bp, Artificial Sequence
  HA-SEL-FUKW4
gacgtctaagaaaccattattatcatgacattaacctataaaaataggcgtatcacgaggccctttcgtctcgcgcgtttcggtgatgacggtgaaaacctctgacacatgcagctcccggagacggtcacagcttgtctgtaagcggatgccgggagcagacaagcccgtcagggcgcgtcagcgggtgttggcgggtgtcggggctggcttaactatgcggcatcagagcagattgtactgagagtgcaccatatgacacgattaccaatacttttgttactaatatcattagtatacgctacaccttttcctcagacatctaaaaaaataggtgatgatgcaactctatcatgtaatcgaaataatacaaatgactacgttgttatgagtgcttggtataaggagcccaattccattattcttttagctgctaaaagcgacgtcttgtattttgataattataccaaggataaaatatcttacgactctccatacgatgatctagttacaactatcacaattaaatcattgactgctagagatgccggtacttatgtatgtgcattctttatgacatcgcctacaaatgacactgataaagtagattatgaagaatactccacagagttgattgtaaatacagatagtgaatcgactatagacataatactatctggatctacacattcaccggaaactagttctgagaaacctgattatatagataattctaattgctcgtcggtattcgaaatctaagcttaaaaattgaaattttattttttttttttggaatataaataagctcgaagtcgaccaccatggtgggtgaggatagcgtgctgatcaccgagaacatgcacatgaaactgtacatggagggcaccgtgaacgaccaccacttcaagtgcacatccgagggcgaaggcaagccctacgagggcacccagaccatgaagatcaaggtggtcgagggcggccctctccccttcgccttcgacatcctggctaccagcttcatgtacggcagcaaaacctttatcaaccacacccagggcatccccgacttctttaagcagtccttccctgagggcttcacatgggagaggatcaccacatacgaagacgggggcgtgctgaccgctacccaggacaccagcctccagaacggctgcctcatctacaacgtcaagatcaacggggtgaacttcccatccaacggccctgtgatgcagaagaaaacactcggctgggaggccagcaccgagatgctgtaccccgctgacagcggcctgagaggccatagccagatggccctgaagctcgtgggcgggggctacctgcactgctccctcaagaccacatacagatccaagaaacccgctaagaacctcaagatgcccggcttctacttcgtggacaggagactggaaagaatcaaggaggccgacaaagagacctacgtcgagcagcacgagatggctgtggccaggtactgcgacctgcctagcaaactggggcacagctgattaattaatttttatcgatctaattcaacaatgtctggagagctcggtaccaagcttcgcaggatcccgactccggaaccaattactgataaagaagatcatacagttacagacactgtctcatacactacagtaagtacatcatctggaattgtcactactaaatcaaccaccgatgatacgtacaatgataatgatacagtaccaccaactactgtaggcggtagtacaacctctattagcaattataaaaccaaggactttgtagaaatatttggtattaccgcattaattatattgtcggccgtggcaatattctgtattacgtattatatatgtaataaacgttcacgtaaatacaaaacagagaacaaagtctagatttttgacttacataaatgtctgggatagtaaaatctatcagaattctagaaaagtagaaaatatattctaatttattgcacgggatgagcgaaaaatacatcgtcacctgggacatgttgcagatccatgcacgtaaactcgcaagccgactgatgccttctgaacaatggaaaggcattattgccgtaagccgtggcggtctggtaccgggtgcgttactggcgcgtgaactgggtattcgtcatgtcgataccgtttgtatttccagctacgatcacgacaaccagcgcgagcttaaagtgctgaaacgcgcagaaggcgatggcgaaggcttcatcgttattgatgacctggtggataccggtggtactgcggttgcgattcgtgaaatgtatccaaaagcgcactttgtcaccatcttcgcaaaaccggctggtcgtccgctggttgatgactatgttgttgatatcccgcaagatacctggattgaacagccgtgggatatgggcgtcgtattcgtcccgccaatctccggtcgctaaggatcagcttggcgtaatcatggtcatagctgtttcctgtgtgaaattgttatccgctcacaattccacacaacatacgagccggaagcataaagtgtaaagcctggggtgcctaatgagtgagctaactcacattaattgcgttgcgctcactgcccgctttccagtcgggaaacctgtcgtgccagctgcattaatgaatcggccaacgcgcggggagaggcggtttgcgtattgggcgctcttccgcttcctcgctcactgactcgctgcgctcggtcgttcggctgcggcgagcggtatcagctcactcaaaggcggtaatacggttatccacagaatcaggggataacgcaggaaagaacatgtgagcaaaaggccagcaaaaggccaggaaccgtaaaaaggccgcgttgctggcgtttttccataggctccgcccccctgacgagcatcacaaaaatcgacgctcaagtcagaggtggcgaaacccgacaggactataaagataccaggcgtttccccctggaagctccctcgtgcgctctcctgttccgaccctgccgcttaccggatacctgtccgcctttctcccttcgggaagcgtggcgctttctcatagctcacgctgtaggtatctcagttcggtgtaggtcgttcgctccaagctgggctgtgtgcacgaaccccccgttcagcccgaccgctgcgccttatccggtaactatcgtcttgagtccaacccggtaagacacgacttatcgccactggcagcagccactggtaacaggattagcagagcgaggtatgtaggcggtgctacagagttcttgaagtggtggcctaactacggctacactagaaggacagtatttggtatctgcgctctgctgaagccagttaccttcggaaaaagagttggtagctcttgatccggcaaacaaaccaccgctggtagcggtggtttttttgtttgcaagcagcagattacgcgcagaaaaaaaggatctcaagaagatcctttgatcttttctacggggtctgacgctcagtggaacgaaaactcacgttaagggattttggtcatgagattatcaaaaaggatcttcacctagatccttttaaattaaaaatgaagttttaaatcaatctaaagtatatatgagtaaacttggtctgacagttaccaatgcttaatcagtgaggcacctatctcagcgatctgtctatttcgttcatccatagttgcctgactccccgtcgtgtagataactacgatacgggagggcttaccatctggccccagtgctgcaatgataccgcgagacccacgctcaccggctccagatttatcagcaataaaccagccagccggaagggccgagcgcagaagtggtcctgcaactttatccgcctccatccagtctattaattgttgccgggaagctagagtaagtagttcgccagttaatagtttgcgcaacgttgttgccattgctacaggcatcgtggtgtcacgctcgtcgtttggtatggcttcattcagctccggttcccaacgatcaaggcgagttacatgatcccccatgttgtgcaaaaaagcggttagctccttcggtcctccgatcgttgtcagaagtaagttggccgcagtgttatcactcatggttatggcagcactgcataattctcttactgtcatgccatccgtaagatgcttttctgtgactggtgagtactcaaccaagtcattctgagaatagtgtatgcggcgaccgagttgctcttgcccggcgtcaatacgggataataccgcgccacatagcagaactttaaaagtgctcatcattggaaaacgttcttcggggcgaaaactctcaaggatcttaccgctgttgagatccagttcgatgtaacccactcgtgcacccaactgatcttcagcatcttttactttcaccagcgtttctgggtgagcaaaaacaggaaggcaaaatgccgcaaaaaagggaataagggcgacacggaaatgttgaatactcatactcttcctttttcaatattattgaagcatttatcagggttattgtctcatgagcggatacatatttgaatgtatttagaaaaataaacaaataggggttccgcgcacatttccccgaaaagtgccacct

SEQ ID NO: 223 - DNA, 4733 bp, Artificial Sequence
  FSEL-tetR1
gacgtctaagaaaccattattatcatgacattaacctataaaaataggcgtatcacgaggccctttcgtctcgcgcgtttcggtgatgacggtgaaaacctctgacacatgcagctcccggagacggtcacagcttgtctgtaagcggatgccgggagcagacaagcccgtcagggcgcgtcagcgggtgttggcgggtgtcggggctggcttaactatgcggcatcagagcagattgtactgagagtgcaccatatgtagaagaattgataaatatgaaaccttttaagaatatgaataaaataacaattaatcaaaaggataattgtatattagcaaatcgatgctttgttaaaatagatactcctagatacataccatcgacatccattagcagttctaatatcatcagaatacggaatcatgattttacattatctgaattattgtattcaccgtttcattttcaacagcctcagtttcaatatctccttcctgggtttgtattaacgtgtattgataaagtttcgaaacagcaaaaagaatgtaaatattgtatctctaatcgtggagatgatgatagtttaagcattaatctatttattccgactattaacaagtctatatatattattatcggtttacggatgaaaaatttttggaagcctaaattcgaaatagaataatgtttttatattatacatgtgctaaaagaatgatcgatacagtttaagtgaaagctagagaggggtttttaaatggtcatcggtttagtcatattcgtgtctgtaagcttaaaaattgaaattttattttttttttttggaatataaataagctcgaagtcgagatgtccagactggacaagagcaaagtcatcaactctgccttggagctcctgaatgaagttggcattgagggcttgaccaccaggaagctggcccagaagctgggtgtggagcagcctaccctgtactggcatgtgaagaacaagagggctctgcttgatgccctggccattgagatgttggacaggcaccacacccacttctgccctctggaaggggagtcctggcaggacttcctgaggaacaatgccaagagcttcagatgtgccttgctctcccaccgggatggtgccaaagttcacttgggcaccaggcctacagagaagcagtatgagaccctggagaaccagctggcattcctgtgccaacaaggcttctccctggaaaatgccttgtatgccctctctgctgtgggccacttcaccttgggctgtgtgctggaggaccaggagcaccaagttgccaaggaggagagggagacccccaccactgactccatgccaccactgctgcggcaagctattgagttgtttgaccaccaaggggctgagcctgcattcctttttggcctggaactgatcatctgtggcctggaaaagcagctgaaatgtgagtctggctcttgaggatcctgcggccgccatcgtcggtgtgttgtctaacgtattggacatgtttatgtacgtagaagaaaataatgaagaggatgctagaatcaaggaggagcaagaactactgttgctatattaatacataattgaaaatctaccaacttaaatacaccgcctataaatttacaatgaaacacagattgtattctgaaggattgagtattagtaatgatttaaactcgataatcggtcaacaatctacaatggatacggatatagaaatagacgaagatgacatcatggaacttcttaatatattgactgagttaggttgtgatgtcgactttgatgaaaattttagcgatatagccgatgatattctagaatcgttgatagaacaggatgtataagtttttatgttaactaaatgtggccatttgcatcggtacctgcgggagcaaaatgtaggctggtagaaacactaccagaaaatatggattttagatccgatcatttaacaacatttgaatgttttaacgaaattatcactctagctaagaaatatatatacatagcatctttttgttgtaatcctctgaattctagaaaagtagaaaatatattctaatttattgcacgggatgagcgaaaaatacatcgtcacctgggacatgttgcagatccatgcacgtaaactcgcaagccgactgatgccttctgaacaatggaaaggcattattgccgtaagccgtggcggtctggtaccgggtgcgttactggcgcgtgaactgggtattcgtcatgtcgataccgtttgtatttccagctacgatcacgacaaccagcgcgagcttaaagtgctgaaacgcgcagaaggcgatggcgaaggcttcatcgttattgatgacctggtggataccggtggtactgcggttgcgattcgtgaaatgtatccaaaagcgcactttgtcaccatcttcgcaaaaccggctggtcgtccgctggttgatgactatgttgttgatatcccgcaagatacctggattgaacagccgtgggatatgggcgtcgtattcgtcccgccaatctccggtcgctaaggatcagcttggcgtaatcatggtcatagctgtttcctgtgtgaaattgttatccgctcacaattccacacaacatacgagccggaagcataaagtgtaaagcctggggtgcctaatgagtgagctaactcacattaattgcgttgcgctcactgcccgctttccagtcgggaaacctgtcgtgccagctgcattaatgaatcggccaacgcgcggggagaggcggtttgcgtattgggcgctcttccgcttcctcgctcactgactcgctgcgctcggtcgttcggctgcggcgagcggtatcagctcactcaaaggcggtaatacggttatccacagaatcaggggataacgcaggaaagaacatgtgagcaaaaggccagcaaaaggccaggaaccgtaaaaaggccgcgttgctggcgtttttccataggctccgcccccctgacgagcatcacaaaaatcgacgctcaagtcagaggtggcgaaacccgacaggactataaagataccaggcgtttccccctggaagctccctcgtgcgctctcctgttccgaccctgccgcttaccggatacctgtccgcctttctcccttcgggaagcgtggcgctttctcatagctcacgctgtaggtatctcagttcggtgtaggtcgttcgctccaagctgggctgtgtgcacgaaccccccgttcagcccgaccgctgcgccttatccggtaactatcgtcttgagtccaacccggtaagacacgacttatcgccactggcagcagccactggtaacaggattagcagagcgaggtatgtaggcggtgctacagagttcttgaagtggtggcctaactacggctacactagaaggacagtatttggtatctgcgctctgctgaagccagttaccttcggaaaaagagttggtagctcttgatccggcaaacaaaccaccgctggtagcggtggtttttttgtttgcaagcagcagattacgcgcagaaaaaaaggatctcaagaagatcctttgatcttttctacggggtctgacgctcagtggaacgaaaactcacgttaagggattttggtcatgagattatcaaaaaggatcttcacctagatccttttaaattaaaaatgaagttttaaatcaatctaaagtatatatgagtaaacttggtctgacagttaccaatgcttaatcagtgaggcacctatctcagcgatctgtctatttcgttcatccatagttgcctgactccccgtcgtgtagataactacgatacgggagggcttaccatctggccccagtgctgcaatgataccgcgagacccacgctcaccggctccagatttatcagcaataaaccagccagccggaagggccgagcgcagaagtggtcctgcaactttatccgcctccatccagtctattaattgttgccgggaagctagagtaagtagttcgccagttaatagtttgcgcaacgttgttgccattgctacaggcatcgtggtgtcacgctcgtcgtttggtatggcttcattcagctccggttcccaacgatcaaggcgagttacatgatcccccatgttgtgcaaaaaagcggttagctccttcggtcctccgatcgttgtcagaagtaagttggccgcagtgttatcactcatggttatggcagcactgcataattctcttactgtcatgccatccgtaagatgcttttctgtgactggtgagtactcaaccaagtcattctgagaatagtgtatgcggcgaccgagttgctcttgcccggcgtcaatacgggataataccgcgccacatagcagaactttaaaagtgctcatcattggaaaacgttcttcggggcgaaaactctcaaggatcttaccgctgttgagatccagttcgatgtaacccactcgtgcacccaactgatcttcagcatcttttactttcaccagcgtttctgggtgagcaaaaacaggaaggcaaaatgccgcaaaaaagggaataagggcgacacggaaatgttgaatactcatactcttcctttttcaatattattgaagcatttatcagggttattgtctcatgagcggatacatatttgaatgtatttagaaaaataaacaaataggggttccgcgcacatttccccgaaaagtgccacct

SEQ ID NO: 224 - DNA, 6081 bp, Artificial Sequence
  FSE-hNISa
gacgtctaagaaaccattattatcatgacattaacctataaaaataggcgtatcacgaggccctttcgtctcgcgcgtttcggtgatgacggtgaaaacctctgacacatgcagctcccggagacggtcacagcttgtctgtaagcggatgccgggagcagacaagcccgtcagggcgcgtcagcgggtgttggcgggtgtcggggctggcttaactatgcggcatcagagcagattgtactgagagtgcaccatatgtagaagaattgataaatatgaaaccttttaagaatatgaataaaataacaattaatcaaaaggataattgtatattagcaaatcgatgctttgttaaaatagatactcctagatacataccatcgacatccattagcagttctaatatcatcagaatacggaatcatgattttacattatctgaattattgtattcaccgtttcattttcaacagcctcagtttcaatatctccttcctgggtttgtattaacgtgtattgataaagtttcgaaacagcaaaaagaatgtaaatattgtatctctaatcgtggagatgatgatagtttaagcattaatctatttattccgactattaacaagtctatatatattattatcggtttacggatgaaaaatttttggaagcctaaattcgaaatagaataatgtttttatattatacatgtgctaaaagaatgatcgatacagtttaagtgaaagctagagaggggtttttaaatggtcatcggtttagtcatattcgtgtctgtaagcttaaaaattgaaaaactagcgtctttttttgctcgaagtcgaccaccatggaggccgtggagaccggggaacggcccaccttcggagcctgggactacggggtctttgccctcatgctcctggtgtccactggcatcgggctgtgggtcgggctggctcggggcgggcagcgcagcgctgaggacttcttcaccgggggccggcgcctggcggccctgcccgtgggcctgtcgctgtctgccagcttcatgtcggccgtgcaggtgctgggcgtgccgtcggaggcctatcgctatggcctcaagttcctctggatgtgcctgggccagcttctgaactcggtcctcaccgccctgctcttcatgcccgtcttctaccgcctgggcctcaccagcacctacgagtacctggagatgcgcttcagccgcgcagtgcggctctgcgggactttgcagtacattgtagccacgatgctgtacaccggcatcgtaatctacgcaccggccctcatcctgaaccaagtgaccgggctggacatctgggcgtcgctcctgtccaccggaattatctgcaccttctacacggctgtgggcggcatgaaggctgtggtctggactgatgtgttccaggtcgtggtgatgctaagtggcttctgggttgtcctggcacgcggtgtcatgcttgtgggcgggccccgccaggtgctcacgctggcccagaaccactcccggatcaacctcatggactttaaccctgacccgaggagccgctatacattctggacttttgtggtgggtggcacgttggtgtggctctccatgtatggcgtgaaccaggcgcaggtgcagcgctacgtggcttgccgcacagagaagcaggccaagctggccctgctcatcaaccaggtcggcctgttcctgatcgtgtccagcgctgcctgctgtggcatcgtcatgtttgtgttctacactgactgcgaccctctcctcctggggcgcatctctgccccagaccagtacatgcctctgctggtgctggacatcttcgaagatctgcctggagtccccgggcttttcctggcctgtgcttacagtggcaccctcagcacagcatccaccagcatcaatgctatggctgcagtcactgtagaagacctcatcaaacctcggctgcggagcctggcacccaggaaactcgtgattatctccaaggggctctcactcatctacggatcggcctgtctcaccgtggcagccctgtcctcactgctcggaggaggtgtccttcagggctccttcaccgtcatgggagtcatcagcggccccctgctgggagccttcatcttgggaatgttcctgccggcctgcaacacaccgggcgtcctcgcgggactaggcgcgggcttggcgctgtcgctgtgggtggccttgggcgccacgctgtacccacccagcgagcagaccatgagggtcctgccatcgtcggctgcccgctgcgtggctctctcagtcaacgcctctggcctcctggacccggctctcctccctgctaacgactccagcagggcccccagctcaggaatggacgccagccgacccgccttagctgacagcttctatgccatctcctatctctattacggtgccctgggcacgctgaccactgtgctgtgcggagccctcatcagctgcctgacaggccccaccaagcgcagcaccctggccccgggattgttgtggtgggacctcgcacggcagacagcatcagtggcccccaaggaagaagtggccatcctggatgacaacttggtcaagggtcctgaagaactccccactggaaacaagaagccccctggcttcctgcccaccaatgaggatcgtctgtttttcttggggcagaaggagctggagggggctggctcttggaccccctgtgttggacatgatggtggtcgagaccagcaggagacaaacctctgattaattaatttttatcgatctaattcaacaatgtctggaaagcttcgcaggatcctgcggccgccatcgtcggtgtgttgtctaacgtattggacatgtttatgtacgtagaagaaaataatgaagaggatgctagaatcaaggaggagcaagaactactgttgctatattaatacataattgaaaatctaccaacttaaatacaccgcctataaatttacaatgaaacacagattgtattctgaaggattgagtattagtaatgatttaaactcgataatcggtcaacaatctacaatggatacggatatagaaatagacgaagatgacatcatggaacttcttaatatattgactgagttaggttgtgatgtcgactttgatgaaaattttagcgatatagccgatgatattctagaatcgttgatagaacaggatgtataagtttttatgttaactaaatgtggccatttgcatcggtacctgcgggagcaaaatgtaggctggtagaaacactaccagaaaatatggattttagatccgatcatttaacaacatttgaatgttttaacgaaattatcactctagctaagaaatatatatacatagcatctttttgttgtaatcctctgaattctagaaaagtagaaaatatattctaatttattgcacgggatgagcgaaaaatacatcgtcacctgggacatgttgcagatccatgcacgtaaactcgcaagccgactgatgccttctgaacaatggaaaggcattattgccgtaagccgtggcggtctggtaccgggtgcgttactggcgcgtgaactgggtattcgtcatgtcgataccgtttgtatttccagctacgatcacgacaaccagcgcgagcttaaagtgctgaaacgcgcagaaggcgatggcgaaggcttcatcgttattgatgacctggtggataccggtggtactgcggttgcgattcgtgaaatgtatccaaaagcgcactttgtcaccatcttcgcaaaaccggctggtcgtccgctggttgatgactatgttgttgatatcccgcaagatacctggattgaacagccgtgggatatgggcgtcgtattcgtcccgccaatctccggtcgctaaggatcagcttggcgtaatcatggtcatagctgtttcctgtgtgaaattgttatccgctcacaattccacacaacatacgagccggaagcataaagtgtaaagcctggggtgcctaatgagtgagctaactcacattaattgcgttgcgctcactgcccgctttccagtcgggaaacctgtcgtgccagctgcattaatgaatcggccaacgcgcggggagaggcggtttgcgtattgggcgctcttccgcttcctcgctcactgactcgctgcgctcggtcgttcggctgcggcgagcggtatcagctcactcaaaggcggtaatacggttatccacagaatcaggggataacgcaggaaagaacatgtgagcaaaaggccagcaaaaggccaggaaccgtaaaaaggccgcgttgctggcgtttttccataggctccgcccccctgacgagcatcacaaaaatcgacgctcaagtcagaggtggcgaaacccgacaggactataaagataccaggcgtttccccctggaagctccctcgtgcgctctcctgttccgaccctgccgcttaccggatacctgtccgcctttctcccttcgggaagcgtggcgctttctcatagctcacgctgtaggtatctcagttcggtgtaggtcgttcgctccaagctgggctgtgtgcacgaaccccccgttcagcccgaccgctgcgccttatccggtaactatcgtcttgagtccaacccggtaagacacgacttatcgccactggcagcagccactggtaacaggattagcagagcgaggtatgtaggcggtgctacagagttcttgaagtggtggcctaactacggctacactagaaggacagtatttggtatctgcgctctgctgaagccagttaccttcggaaaaagagttggtagctcttgatccggcaaacaaaccaccgctggtagcggtggtttttttgtttgcaagcagcagattacgcgcagaaaaaaaggatctcaagaagatcctttgatcttttctacggggtctgacgctcagtggaacgaaaactcacgttaagggattttggtcatgagattatcaaaaaggatcttcacctagatccttttaaattaaaaatgaagttttaaatcaatctaaagtatatatgagtaaacttggtctgacagttaccaatgcttaatcagtgaggcacctatctcagcgatctgtctatttcgttcatccatagttgcctgactccccgtcgtgtagataactacgatacgggagggcttaccatctggccccagtgctgcaatgataccgcgagacccacgctcaccggctccagatttatcagcaataaaccagccagccggaagggccgagcgcagaagtggtcctgcaactttatccgcctccatccagtctattaattgttgccgggaagctagagtaagtagttcgccagttaatagtttgcgcaacgttgttgccattgctacaggcatcgtggtgtcacgctcgtcgtttggtatggcttcattcagctccggttcccaacgatcaaggcgagttacatgatcccccatgttgtgcaaaaaagcggttagctccttcggtcctccgatcgttgtcagaagtaagttggccgcagtgttatcactcatggttatggcagcactgcataattctcttactgtcatgccatccgtaagatgcttttctgtgactggtgagtactcaaccaagtcattctgagaatagtgtatgcggcgaccgagttgctcttgcccggcgtcaatacgggataataccgcgccacatagcagaactttaaaagtgctcatcattggaaaacgttcttcggggcgaaaactctcaaggatcttaccgctgttgagatccagttcgatgtaacccactcgtgcacccaactgatcttcagcatcttttactttcaccagcgtttctgggtgagcaaaaacaggaaggcaaaatgccgcaaaaaagggaataagggcgacacggaaatgttgaatactcatactcttcctttttcaatattattgaagcatttatcagggttattgtctcatgagcggatacatatttgaatgtatttagaaaaataaacaaataggggttccgcgcacatttccccgaaaagtgccacct

SEQ ID NO: 225 - DNA, 5832 bp, Artificial Sequence
  HA-SL-hNIS-1
gacgtctaagaaaccattattatcatgacattaacctataaaaataggcgtatcacgaggccctttcgtctcgcgcgtttcggtgatgacggtgaaaacctctgacacatgcagctcccggagacggtcacagcttgtctgtaagcggatgccgggagcagacaagcccgtcagggcgcgtcagcgggtgttggcgggtgtcggggctggcttaactatgcggcatcagagcagattgtactgagagtgcaccatatgacacgattaccaatacttttgttactaatatcattagtatacgctacaccttttcctcagacatctaaaaaaataggtgatgatgcaactctatcatgtaatcgaaataatacaaatgactacgttgttatgagtgcttggtataaggagcccaattccattattcttttagctgctaaaagcgacgtcttgtattttgataattataccaaggataaaatatcttacgactctccatacgatgatctagttacaactatcacaattaaatcattgactgctagagatgccggtacttatgtatgtgcattctttatgacatcgcctacaaatgacactgataaagtagattatgaagaatactccacagagttgattgtaaatacagatagtgaatcgactatagacataatactatctggatctacacattcaccggaaactagttctgagaaacctgattatatagataattctaattgctcgtcggtattcgaaatctaagctcttttttttttttttttttttggcatataaataagtcgaccaccatggaggccgtggagaccggggaacggcccaccttcggagcctgggactacggggtctttgccctcatgctcctggtgtccactggcatcgggctgtgggtcgggctggctcggggcgggcagcgcagcgctgaggacttcttcaccgggggccggcgcctggcggccctgcccgtgggcctgtcgctgtctgccagcttcatgtcggccgtgcaggtgctgggcgtgccgtcggaggcctatcgctatggcctcaagttcctctggatgtgcctgggccagcttctgaactcggtcctcaccgccctgctcttcatgcccgtcttctaccgcctgggcctcaccagcacctacgagtacctggagatgcgcttcagccgcgcagtgcggctctgcgggactttgcagtacattgtagccacgatgctgtacaccggcatcgtaatctacgcaccggccctcatcctgaaccaagtgaccgggctggacatctgggcgtcgctcctgtccaccggaattatctgcaccttctacacggctgtgggcggcatgaaggctgtggtctggactgatgtgttccaggtcgtggtgatgctaagtggcttctgggttgtcctggcacgcggtgtcatgcttgtgggcgggccccgccaggtgctcacgctggcccagaaccactcccggatcaacctcatggactttaaccctgacccgaggagccgctatacattctggacttttgtggtgggtggcacgttggtgtggctctccatgtatggcgtgaaccaggcgcaggtgcagcgctacgtggcttgccgcacagagaagcaggccaagctggccctgctcatcaaccaggtcggcctgttcctgatcgtgtccagcgctgcctgctgtggcatcgtcatgtttgtgttctacactgactgcgaccctctcctcctggggcgcatctctgccccagaccagtacatgcctctgctggtgctggacatcttcgaagatctgcctggagtccccgggcttttcctggcctgtgcttacagtggcaccctcagcacagcatccaccagcatcaatgctatggctgcagtcactgtagaagacctcatcaaacctcggctgcggagcctggcacccaggaaactcgtgattatctccaaggggctctcactcatctacggatcggcctgtctcaccgtggcagccctgtcctcactgctcggaggaggtgtccttcagggctccttcaccgtcatgggagtcatcagcggccccctgctgggagccttcatcttgggaatgttcctgccggcctgcaacacaccgggcgtcctcgcgggactaggcgcgggcttggcgctgtcgctgtgggtggccttgggcgccacgctgtacccacccagcgagcagaccatgagggtcctgccatcgtcggctgcccgctgcgtggctctctcagtcaacgcctctggcctcctggacccggctctcctccctgctaacgactccagcagggcccccagctcaggaatggacgccagccgacccgccttagctgacagcttctatgccatctcctatctctattacggtgccctgggcacgctgaccactgtgctgtgcggagccctcatcagctgcctgacaggccccaccaagcgcagcaccctggccccgggattgttgtggtgggacctcgcacggcagacagcatcagtggcccccaaggaagaagtggccatcctggatgacaacttggtcaagggtcctgaagaactccccactggaaacaagaagccccctggcttcctgcccaccaatgaggatcgtctgtttttcttggggcagaaggagctggagggggctggctcttggaccccctgtgttggacatgatggtggtcgagaccagcaggagacaaacctctgattaattaatttttatcgatctaattcaacaatgtctggagagcttcgcaggatcccgactccggaaccaattactgataaagaagaagatcatacagttacagacactgtctcatacactacagtaagtacatcatctggaattgtcactactaaatcaaccaccgatgatacgtacaatgataatgatacagtaccaccaactactgtaggcggtagtacaacctctattagcaattataaaaccaaggactttgtagaaatatttggtattaccgcattaattatattgtcggccgtggcaatattctgtattacgtattatatatgtaataaacgttcacgtaaatacaaaacagagaacaaagtctagatttttgacttacataaatgtctgggatagtaaaatctatcagaattctagaaaagtagaaaatatattctaatttattgcacgggatgagcgaaaaatacatcgtcacctgggacatgttgcagatccatgcacgtaaactcgcaagccgactgatgccttctgaacaatggaaaggcattattgccgtaagccgtggcggtctggtaccgggtgcgttactggcgcgtgaactgggtattcgtcatgtcgataccgtttgtatttccagctacgatcacgacaaccagcgcgagcttaaagtgctgaaacgcgcagaaggcgatggcgaaggcttcatcgttattgatgacctggtggataccggtggtactgcggttgcgattcgtgaaatgtatccaaaagcgcactttgtcaccatcttcgcaaaaccggctggtcgtccgctggttgatgactatgttgttgatatcccgcaagatacctggattgaacagccgtgggatatgggcgtcgtattcgtcccgccaatctccggtcgctaaggatcagcttggcgtaatcatggtcatagctgtttcctgtgtgaaattgttatccgctcacaattccacacaacatacgagccggaagcataaagtgtaaagcctggggtgcctaatgagtgagctaactcacattaattgcgttgcgctcactgcccgctttccagtcgggaaacctgtcgtgccagctgcattaatgaatcggccaacgcgcggggagaggcggtttgcgtattgggcgctcttccgcttcctcgctcactgactcgctgcgctcggtcgttcggctgcggcgagcggtatcagctcactcaaaggcggtaatacggttatccacagaatcaggggataacgcaggaaagaacatgtgagcaaaaggccagcaaaaggccaggaaccgtaaaaaggccgcgttgctggcgtttttccataggctccgcccccctgacgagcatcacaaaaatcgacgctcaagtcagaggtggcgaaacccgacaggactataaagataccaggcgtttccccctggaagctccctcgtgcgctctcctgttccgaccctgccgcttaccggatacctgtccgcctttctcccttcgggaagcgtggcgctttctcatagctcacgctgtaggtatctcagttcggtgtaggtcgttcgctccaagctgggctgtgtgcacgaaccccccgttcagcccgaccgctgcgccttatccggtaactatcgtcttgagtccaacccggtaagacacgacttatcgccactggcagcagccactggtaacaggattagcagagcgaggtatgtaggcggtgctacagagttcttgaagtggtggcctaactacggctacactagaaggacagtatttggtatctgcgctctgctgaagccagttaccttcggaaaaagagttggtagctcttgatccggcaaacaaaccaccgctggtagcggtggtttttttgtttgcaagcagcagattacgcgcagaaaaaaaggatctcaagaagatcctttgatcttttctacggggtctgacgctcagtggaacgaaaactcacgttaagggattttggtcatgagattatcaaaaaggatcttcacctagatccttttaaattaaaaatgaagttttaaatcaatctaaagtatatatgagtaaacttggtctgacagttaccaatgcttaatcagtgaggcacctatctcagcgatctgtctatttcgttcatccatagttgcctgactccccgtcgtgtagataactacgatacgggagggcttaccatctggccccagtgctgcaatgataccgcgagacccacgctcaccggctccagatttatcagcaataaaccagccagccggaagggccgagcgcagaagtggtcctgcaactttatccgcctccatccagtctattaattgttgccgggaagctagagtaagtagttcgccagttaatagtttgcgcaacgttgttgccattgctacaggcatcgtggtgtcacgctcgtcgtttggtatggcttcattcagctccggttcccaacgatcaaggcgagttacatgatcccccatgttgtgcaaaaaagcggttagctccttcggtcctccgatcgttgtcagaagtaagttggccgcagtgttatcactcatggttatggcagcactgcataattctcttactgtcatgccatccgtaagatgcttttctgtgactggtgagtactcaaccaagtcattctgagaatagtgtatgcggcgaccgagttgctcttgcccggcgtcaatacgggataataccgcgccacatagcagaactttaaaagtgctcatcattggaaaacgttcttcggggcgaaaactctcaaggatcttaccgctgttgagatccagttcgatgtaacccactcgtgcacccaactgatcttcagcatcttttactttcaccagcgtttctgggtgagcaaaaacaggaaggcaaaatgccgcaaaaaagggaataagggcgacacggaaatgttgaatactcatactcttcctttttcaatattattgaagcatttatcagggttattgtctcatgagcggatacatatttgaatgtatttagaaaaataaacaaataggggttccgcgcacatttccccgaaaagtgccacct

SEQ ID NO: 226 - DNA, 3594 bp, Artificial Sequence
  sodium iodide symporter, member 5 (SLC5A5)
  CDS (348)...(2279): SLC5A5
  ref <308>: DATABASE ACCESSION NUMBER: NCBI: NM_000453.2
  ref <309>: DATABASE ENTRY DATE: 2013-01-06
gctgtcagcgctgagcacagcgcccagggagagggacagacagccggctgcatgggacagcggaacccagagtgagaggggaggtggcaggacagacagacagcaggggcggacgcagagacagacagcggggacagggaggccgacacggacatcgacagcccatagattcctaacccagggagccccggcccctctcgccgcttcccaccccagacggagcggggacaggctgccgagcatcctcccacccgccctccccgtcctgcctcctcggcccctgccagcttcccccgcttgagcacgcagggcgtccgaggacgcgctgggcctccgcacccgccctcatggaggccgtggagaccggggaacggcccaccttcggagcctgggactacggggtctttgccctcatgctcctggtgtccactggcatcgggctgtgggtcgggctggctcggggcgggcagcgcagcgctgaggacttcttcaccgggggccggcgcctggcggccctgcccgtgggcctgtcgctgtctgccagcttcatgtcggccgtgcaggtgctgggcgtgccgtcggaggcctatcgctatggcctcaagttcctctggatgtgcctgggccagcttctgaactcggtcctcaccgccctgctcttcatgcccgtcttctaccgcctgggcctcaccagcacctacgagtacctggagatgcgcttcagccgcgcagtgcggctctgcgggactttgcagtacattgtagccacgatgctgtacaccggcatcgtaatctacgcaccggccctcatcctgaaccaagtgaccgggctggacatctgggcgtcgctcctgtccaccggaattatctgcaccttctacacggctgtgggcggcatgaaggctgtggtctggactgatgtgttccaggtcgtggtgatgctaagtggcttctgggttgtcctggcacgcggtgtcatgcttgtgggcgggccccgccaggtgctcacgctggcccagaaccactcccggatcaacctcatggactttaaccctgacccgaggagccgctatacattctggacttttgtggtgggtggcacgttggtgtggctctccatgtatggcgtgaaccaggcgcaggtgcagcgctacgtggcttgccgcacagagaagcaggccaagctggccctgctcatcaaccaggtcggcctgttcctgatcgtgtccagcgctgcctgctgtggcatcgtcatgtttgtgttctacactgactgcgaccctctcctcctggggcgcatctctgccccagaccagtacatgcctctgctggtgctggacatcttcgaagatctgcctggagtccccgggcttttcctggcctgtgcttacagtggcaccctcagcacagcatccaccagcatcaatgctatggctgcagtcactgtagaagacctcatcaaacctcggctgcggagcctggcacccaggaaactcgtgattatctccaaggggctctcactcatctacggatcggcctgtctcaccgtggcagccctgtcctcactgctcggaggaggtgtccttcagggctccttcaccgtcatgggagtcatcagcggccccctgctgggagccttcatcttgggaatgttcctgccggcctgcaacacaccgggcgtcctcgcgggactaggcgcgggcttggcgctgtcgctgtgggtggccttgggcgccacgctgtacccacccagcgagcagaccatgagggtcctgccatcgtcggctgcccgctgcgtggctctctcagtcaacgcctctggcctcctggacccggctctcctccctgctaacgactccagcagggcccccagctcaggaatggacgccagccgacccgccttagctgacagcttctatgccatctcctatctctattacggtgccctgggcacgctgaccactgtgctgtgcggagccctcatcagctgcctgacaggccccaccaagcgcagcaccctggccccgggattgttgtggtgggacctcgcacggcagacagcatcagtggcccccaaggaagaagtggccatcctggatgacaacttggtcaagggtcctgaagaactccccactggaaacaagaagccccctggcttcctgcccaccaatgaggatcgtctgtttttcttggggcagaaggagctggagggggctggctcttggaccccctgtgttggacatgatggtggtcgagaccagcaggagacaaacctctgaggacagggccagccgcgggactgacaccctgggatggaacctcaggatgggccaaacccagacaacgggcccatggccttgggctctgattggctggattgccttgtatgcaaatgagttcaggactacaataccctaccctatggggaggccctgcctccgggaggtcattttttaaatccagccccttgcttcaaccgtccccagtattagacgctgcagccctgacggctccccccaaataaggctgggtttttctctctctcttttttttttttttttttttttgagacagggtcatgctctgtcacccaggctggagtgcagtggtgtgatctcggctcactgcaacctctgcctcccaggctcaagtgattctcctgcctcagcctcttgagtagctgggattgtaggtgcccaccaccatgcccagccaactttttgtatttttagtagagacagggtttcaccatgttggtcaggctggtctcgaactcctgacctcaagtgatccacctgcctcggcctcccaaagtgctgggttacaggcgtaagctaccatgcccagcctaccgtttttctcaatctataatagaaagccaccacgcccaggtaatttttgtaattttgtatttttgtagagacggggttttgccatgttggccaggctggtctcaaactcctgatctcaggtgatcctcctgccttggcctcccaaagggctgggattacaggggtgagccaccgcgccccacctctttcttattttcttcctgggattggggaggggatgattcagaccccacatggcctccaaccttggcccacacacctgccatggctcccatcatcctgagcatgctagcgtcccctcctcacctgacaatggaggctctcgaattgggttgtgtccccccaaaatttatgtctacccagaacctcagaacatgagcttacttggaaatagggtctttgcaggtgtaactggttaaattaaaagaggtattactggaggaggatggatgaatccagtgactggttcctcatatgaagtagagaagagatgcagagaaacacatggggaagatgccacgtgaagacagaggcagtggttggatcaatgcatctacgagtcggagaacccaaggattgccagcaacaaccagaaatcaggaggggggcatgagatgcattatttcttagagcctttagagggaacatggccctactgacaccttgatgtcagacttctggctgctagaactgtcagagaataaatttctgttgtttgatgccaaaaaaaaaaaaaaaaaaa

SEQ ID NO: 227 - DNA, 7163 bp, Artificial Sequence
  TK-SL-tetO-mTyr
agcgcccaatacgcaaaccgcctctccccgcgcgttggccgattcattaatgcagctggcacgacaggtttcccgactggaaagcgggcagtgagcgcaacgcaattaatgtgagttagctcactcattaggcaccccaggctttacactttatgcttccggctcgtatgttgtgtggaattgtgagcggataacaatttcacacaggaaacagctatgaccatgattacgccaagctttgttacagatggaagggtcaaacttaataaaggatatttgttcgactttgtgattagtttgatgcgattcaaaaaagaatcctctctagctaccaccgcaatagatcctgttagatacatagatcctcgtcgtgatatcgcattttctaacgtgatggatatattaaagtcgaataaagtgaacaataattaattctttattgtcatcatgaacggcggacatattcagttgataatcggccccatgttttcaggtaaaagtacagaattaattagacgagttagacgttatcaaatagctcaatataaatgcgtgactataaaatattctaacgataatagatacggaacgggactatggacgcatgataagaataattttgaagcattggaagcaactaaactatgtgatgtcttggaatcaattacagatttctccgtgataggtatcgatgaaggacagttctttccagacattgtttaattctgtgagcgtatggcaaacggtaccgagctcttttttttttttttttttttggcatataaataagtcgactccctatcagtgatagagaatgttcttggctgttttgtattgccttctgtggagtttccagatctctgatggccattttcctcgagcctgtgcctcctctaagaacttgttggcaaaagaatgctgcccaccatggatgggtgatgggagtccctgcggccagctttcaggcagaggttcctgccaggatatccttctgtccagtgcaccatctggacctcagttccccttcaaaggggtggatgaccgtgagtcctggccctctgtgttttataataggacctgccagtgctcaggcaacttcatgggtttcaactgcggaaactgtaagtttggatttgggggcccaaattgtacagagaagcgagtcttgattagaagaaacatttttgatttgagtgtctccgaaaagaataagttcttttcttacctcactttagcaaaacatactatcagctcagtctatgtcatccccacaggcacctatggccaaatgaacaatgggtcaacacccatgtttaatgatatcaacatctacgacctctttgtatggatgcattactatgtgtcaagggacacactgcttgggggctctgaaatatggagggacattgattttgcccatgaagcaccagggtttctgccttggcacagacttttcttgttattgtgggaacaagaaattcgagaactaactggggatgagaacttcactgttccatactgggattggagagatgcagaaaactgtgacatttgcacagatgagtacttgggaggtcgtcaccctgaaaatcctaacttactcagcccagcatccttcttctcctcctggcagatcatttgtagcagatcagaagagtataatagccatcaggttttatgcgatggaacacctgagggaccactattacgtaatcctggaaaccatgacaaagccaaaacccccaggctcccatcttcagcagatgtggaattttgtctgagtttgacccagtatgaatctggatcaatggatagaactgccaatttcagctttagaaacacactggaaggatttgccagtccactcacagggatagcagatccttctcaaagtagcatgcacaatgccttacatatctttatgaatggaacaatgtcccaagtacagggatcggccaacgatcccatttttcttcttcaccatgcttttgtggacagtatttttgaacaatggctgcgaaggcaccgccctcttttggaagtttacccagaagccaatgcacctatcggccataacagagactcttacatggttcctttcataccgctctatagaaatggtgatttcttcataacatccaaggatctgggatatgactacagctacctccaagagtcagatccaggcttttacagaaattatattgagccttacttggaacaagccagtcgtatctggccatggcttcttggggcagcactggtgggagctgttattgctgcagctctctctgggcttagcagtaggctatgccttcagaagaagaagaagaagaagcaaccccaggaggaaaggcagccactcctcatggacaaagacgactaccacagcttgctgtatcagagccatctgtgattaattaatttttatcgatctaattcaacaatgtctggagagctcggatccttctgtgagcgtatggcaaacgaaggaaaaatagttatagtagccgcactcgatgggacatttcaacgtaaaccgtttaataatattttgaatcttattccattatctgaaatggtggtaaaactaactgctgtgtgtatgaaatgctttaaggaggcttccttttctaaacgattgggtgaggaaaccgagatagagataataggaggtaatgatatgtatcaatcggtgtgtagaaagtgttacgtcggctcataatattatattttttatctaaaaaactaaaaataaacattgattaaattttaatataatacttaaaaatggatgttgtgtcgttagataaaccgtttatgtattttgaggaaattgataatgagttagattacgaaccagaaagtgcaaatgaggtcgcaaaaaaactgccgtatcaaggacagttaaaactattactaggagaattattttttcttagtaagttacagcgacacggtatattagatggtgccaccgtagtgtactagttaacggccgccagtgtgctggaattctagaaaagtagaaaatatattctaatttattgcacgggatgagcgaaaaatacatcgtcacctgggacatgttgcagatccatgcacgtaaactcgcaagccgactgatgccttctgaacaatggaaaggcattattgccgtaagccgtggcggtctggtaccgggtgcgttactggcgcgtgaactgggtattcgtcatgtcgataccgtttgtatttccagctacgatcacgacaaccagcgcgagcttaaagtgctgaaacgcgcagaaggcgatggcgaaggcttcatcgttattgatgacctggtggataccggtggtactgcggttgcgattcgtgaaatgtatccaaaagcgcactttgtcaccatcttcgcaaaaccggctggtcgtccgctggttgatgactatgttgttgatatcccgcaagatacctggattgaacagccgtgggatatgggcgtcgtattcgtcccgccaatctccggtcgctaaggatcagcttggcgtaatcaagccgaattctgcagatatccatcacactggcggccgctcgagcatgcatctagagggcccaattcgccctatagtgagtcgtattacaattcactggccgtcgttttacaacgtcgtgactgggaaaaccctggcgttacccaacttaatcgccttgcagcacatccccctttcgccagctggcgtaatagcgaagaggcccgcaccgatcgcccttcccaacagttgcgcagcctgaatggcgaatggacgcgccctgtagcggcgcattaagcgcggcgggtgtggtggttacgcgcagcgtgaccgctacacttgccagcgccctagcgcccgctcctttcgctttcttcccttcctttctcgccacgttcgccggctttccccgtcaagctctaaatcgggggctccctttagggttccgatttagtgctttacggcacctcgaccccaaaaaacttgattagggtgatggttcacgtagtgggccatcgccctgatagacggtttttcgccctttgacgttggagtccacgttctttaatagtggactcttgttccaaactggaacaacactcaaccctatctcggtctattcttttgatttataagggattttgccgatttcggcctattggttaaaaaatgagctgatttaacaaaaatttaacgcgaattttaacaaaattcagggcgcaagggctgctaaaggaagcggaacacgtagaaagccagtccgcagaaacggtgctgaccccggatgaatgtcagctactgggctatctggacaagggaaaacgcaagcgcaaagagaaagcaggtagcttgcagtgggcttacatggcgatagctagactgggcggttttatggacagcaagcgaaccggaattgccagctggggcgccctctggtaaggttgggaagccctgcaaagtaaactggatggctttcttgccgccaaggatctgatggcgcaggggatcaagatctgatcaagagacaggatgaggatcgtttcgcatgattgaacaagatggattgcacgcaggttctccggccgcttgggtggagaggctattcggctatgactgggcacaacagacaatcggctgctctgatgccgccgtgttccggctgtcagcgcaggggcgcccggttctttttgtcaagaccgacctgtccggtgccctgaatgaactgcaggacgaggcagcgcggctatcgtggctggccacgacgggcgttccttgcgcagctgtgctcgacgttgtcactgaagcgggaagggactggctgctattgggcgaagtgccggggcaggatctcctgtcatcccaccttgctcctgccgagaaagtatccatcatggctgatgcaatgcggcggctgcatacgcttgatccggctacctgcccattcgaccaccaagcgaaacatcgcatcgagcgagcacgtactcggatggaagccggtcttgtcgatcaggatgatctggacgaagagcatcaggggctcgcgccagccgaactgttcgccaggctcaaggcgcgcatgcccgacggcgaggatctcgtcgtgacccatggcgatgcctgcttgccgaatatcatggtggaaaatggccgcttttctggattcatcgactgtggccggctgggtgtggcggaccgctatcaggacatagcgttggctacccgtgatattgctgaagagcttggcggcgaatgggctgaccgcttcctcgtgctttacggtatcgccgctcccgattcgcagcgcatcgccttctatcgccttcttgacgagttcttctgaattgaaaaaggaagagtatgagtattcaacatttccgtgtcgcccttattcccttttttgcggcattttgccttcctgtttttgctcacccagaaacgctggtgaaagtaaaagatgctgaagatcagttgggtgcacgagtgggttacatcgaactggatctcaacagcggtaagatccttgagagttttcgccccgaagaacgttttccaatgatgagcacttttaaagttctgctatgtggcgcggtattatcccgtattgacgccgggcaagagcaactcggtcgccgcatacactattctcagaatgacttggttgagtactcaccagtcacagaaaagcatcttacggatggcatgacagtaagagaattatgcagtgctgccataaccatgagtgataacactgcggccaacttacttctgacaacgatcggaggaccgaaggagctaaccgcttttttgcacaacatgggggatcatgtaactcgccttgatcgttgggaaccggagctgaatgaagccataccaaacgacgagcgtgacaccacgatgcctgtagcaatggcaacaacgttgcgcaaactattaactggcgaactacttactctagcttcccggcaacaattaatagactggatggaggcggataaagttgcaggaccacttctgcgctcggcccttccggctggctggtttattgctgataaatctggagccggtgagcgtgggtctcgcggtatcattgcagcactggggccagatggtaagccctcccgtatcgtagttatctacacgacggggagtcaggcaactatggatgaacgaaatagacagatcgctgagataggtgcctcactgattaagcattggtaactgtcagaccaagtttactcatatatactttagattgatttaaaacttcatttttaatttaaaaggatctaggtgaagatcctttttgataatctcatgaccaaaatcccttaacgtgagttttcgttccactgagcgtcagaccccgtagaaaagatcaaaggatcttcttgagatcctttttttctgcgcgtaatctgctgcttgcaaacaaaaaaaccaccgctaccagcggtggtttgtttgccggatcaagagctaccaactctttttccgaaggtaactggcttcagcagagcgcagataccaaatactgttcttctagtgtagccgtagttaggccaccacttcaagaactctgtagcaccgcctacatacctcgctctgctaatcctgttaccagtggctgctgccagtggcgataagtcgtgtcttaccgggttggactcaagacgatagttaccggataaggcgcagcggtcgggctgaacggggggttcgtgcacacagcccagcttggagcgaacgacctacaccgaactgagatacctacagcgtgagctatgagaaagcgccacgcttcccgaagggagaaaggcggacaggtatccggtaagcggcagggtcggaacaggagagcgcacgagggagcttccagggggaaacgcctggtatctttatagtcctgtcgggtttcgccacctctgacttgagcgtcgatttttgtgatgctcgtcaggggggcggagcctatggaaaaacgccagcaacgcggcctttttacggttcctggccttttgctggccttttgctcacatgttctttcctgcgttatcccctgattctgtggataaccgtattaccgcctttgagtgagctgataccgctcgccgcagccgaacgttgtttaattctgtgagcgtatggcaaacg

SEQ ID NO: 228 - DNA, 66 bp, Artificial Sequence
  mTyr-E2A reverse primer
attctcttcgacgtctccgcaggtgagcaggctgcctctgccctccagatggctctgatacagcaa

SEQ ID NO: 229 - DNA, 65 bp, Artificial Sequence
  E2A-Tyrp1 forward primer
ggcagcctgctcacctgcggagacgtcgaagagattcctgggcccatgagtgctcctaaactcct

SEQ ID NO: 230 - DNA, 53 bp, Artificial Sequence
  SalI-tetO-mTyr primer
gtcgactccctatcagtgatagagaatgttcttggctgttttgtattgccttc

SEQ ID NO: 231 - DNA, 8834 bp, Artificial Sequence
  TK-SL-tetO-mTyr-E2A-hTyrp1
agcgcccaatacgcaaaccgcctctccccgcgcgttggccgattcattaatgcagctggcacgacaggtttcccgactggaaagcgggcagtgagcgcaacgcaattaatgtgagttagctcactcattaggcaccccaggctttacactttatgcttccggctcgtatgttgtgtggaattgtgagcggataacaatttcacacaggaaacagctatgaccatgattacgccaagctttgttacagatggaagggtcaaacttaataaaggatatttgttcgactttgtgattagtttgatgcgattcaaaaaagaatcctctctagctaccaccgcaatagatcctgttagatacatagatcctcgtcgtgatatcgcattttctaacgtgatggatatattaaagtcgaataaagtgaacaataattaattctttattgtcatcatgaacggcggacatattcagttgataatcggccccatgttttcaggtaaaagtacagaattaattagacgagttagacgttatcaaatagctcaatataaatgcgtgactataaaatattctaacgataatagatacggaacgggactatggacgcatgataagaataattttgaagcattggaagcaactaaactatgtgatgtcttggaatcaattacagatttctccgtgataggtatcgatgaaggacagttctttccagacattgtttaattctgtgagcgtatggcaaacggtaccgagctcttttttttttttttttttttggcatataaataagtcgactccctatcagtgatagagaatgttcttggctgttttgtattgccttctgtggagtttccagatctctgatggccattttcctcgagcctgtgcctcctctaagaacttgttggcaaaagaatgctgcccaccatggatgggtgatgggagtccctgcggccagctttcaggcagaggttcctgccaggatatccttctgtccagtgcaccatctggacctcagttccccttcaaaggggtggatgaccgtgagtcctggccctctgtgttttataataggacctgccagtgctcaggcaacttcatgggtttcaactgcggaaactgtaagtttggatttgggggcccaaattgtacagagaagcgagtcttgattagaagaaacatttttgatttgagtgtctccgaaaagaataagttcttttcttacctcactttagcaaaacatactatcagctcagtctatgtcatccccacaggcacctatggccaaatgaacaatgggtcaacacccatgtttaatgatatcaacatctacgacctctttgtatggatgcattactatgtgtcaagggacacactgcttgggggctctgaaatatggagggacattgattttgcccatgaagcaccagggtttctgccttggcacagacttttcttgttattgtgggaacaagaaattcgagaactaactggggatgagaacttcactgttccatactgggattggagagatgcagaaaactgtgacatttgcacagatgagtacttgggaggtcgtcaccctgaaaatcctaacttactcagcccagcatccttcttctcctcctggcagatcatttgtagcagatcagaagagtataatagccatcaggttttatgcgatggaacacctgagggaccactattacgtaatcctggaaaccatgacaaagccaaaacccccaggctcccatcttcagcagatgtggaattttgtctgagtttgacccagtatgaatctggatcaatggatagaactgccaatttcagctttagaaacacactggaaggatttgccagtccactcacagggatagcagatccttctcaaagtagcatgcacaatgccttacatatctttatgaatggaacaatgtcccaagtacagggatcggccaacgatcccatttttcttcttcaccatgcttttgtggacagtatttttgaacaatggctgcgaaggcaccgccctcttttggaagtttacccagaagccaatgcacctatcggccataacagagactcttacatggttcctttcataccgctctatagaaatggtgatttcttcataacatccaaggatctgggatatgactacagctacctccaagagtcagatccaggcttttacagaaattatattgagccttacttggaacaagccagtcgtatctggccatggcttcttggggcagcactggtgggagctgttattgctgcagctctctctgggcttagcagtaggctatgccttcagaagaagaagaagaagaagcaaccccaggaggaaaggcagccactcctcatggacaaagacgactaccacagcttgctgtatcagagccatctgtgagagggcagaggcagcctgctcacctgcggagacgtcgaagagaatcctgggcccatgagtgctcctaaactcctctctctgggctgtatcttcttccccttgctactttttcagcaggcccgggctcaattcccaagacagtgtgccactgttgaggctttgagaagtggtatgtgttgcccagacctgtcccctgtgtctgggcctgggacagaccgctgtggctcatcatcagggaggggcagatgtgaggcagtgactgcagactcccggccccacagccctcagtatccccatgatggcagagatgatcgggaggtctggcccttgcgcttcttcaataggacatgtcactgcaacggcaatttctcaggacacaactgtgggacgtgccgtcctggctggagaggagctgcctgtgaccagagggttctcatagtcaggagaaatcttctggacttaagtaaagaagaaaagaaccactttgtccgggccctggatatggcaaagcgcacaactcaccctttatttgtcattgccaccaggagatcagaagaaatactggggccagatggcaacacgccacaatttgagaacatttccatttataactactttgtttggacacactattactcagtcaaaaagactttccttggggtaggacaggaaagctttggtgaagtggatttctctcatgagggaccagcttttctcacatggcacaggtaccacctcctgcgtctggagaaagacatgcaggaaatgttgcaagagccttctttctcccttccttactggaattttgcaacggggaaaaatgtctgtgatatctgcacggatgacttgatgggatccagaagcaactttgattccactctaataagcccaaactctgtcttttctcaatggcgagtggtctgtgactccttggaagattatgataccctgggaacactttgtaacagcaccgaggatgggccaattaggagaaatccagctggaaatgtggccagaccaatggtgcaacgtcttcctgaaccacaggatgtcgctcagtgcttggaagttggtttatttgacacgcctcctttttattccaactctacaaacagtttccgaaacacagtggaaggttacagtgaccccacgggaaagtatgaccctgctgttcgaagtcttcacaatttggctcatctattcctgaatggaacagggggacaaacccatttgtctccaaatgatcctatttttgtcctcctgcacaccttcacagatgcagtctttgatgaatggctgaggagatacaatgctgatatatccacatttccattggaaaatgcccctattggacataatagacaatacaacatggtgccattctggcccccagtcaccaacacagaaatgtttgttactgctccagacaacctgggatacacttatgaaattcaatggccaagtcgggagtttagtgtacctgagataattgccatagcagtagttggcgctttgttactggttgcactcatttttgggactgcttcttatctgattcgtgccagacgcagtatggatgaagctaaccagcctctcctcactgatcagtatcaatgctatgctgaagaatatgaaaaactccagaatcctaatcagtctgtggtctaataattaattaatttttatcgatctaattcaacaatgtctggagagctcggatccttctgtgagcgtatggcaaacgaaggaaaaatagttatagtagccgcactcgatgggacatttcaacgtaaaccgtttaataatattttgaatcttattccattatctgaaatggtggtaaaactaactgctgtgtgtatgaaatgctttaaggaggcttccttttctaaacgattgggtgaggaaaccgagatagagataataggaggtaatgatatgtatcaatcggtgtgtagaaagtgttacgtcggctcataatattatattttttatctaaaaaactaaaaataaacattgattaaattttaatataatacttaaaaatggatgttgtgtcgttagataaaccgtttatgtattttgaggaaattgataatgagttagattacgaaccagaaagtgcaaatgaggtcgcaaaaaaactgccgtatcaaggacagttaaaactattactaggagaattattttttcttagtaagttacagcgacacggtatattagatggtgccaccgtagtgtactagttaacggccgccagtgtgctggaattctagaaaagtagaaaatatattctaatttattgcacgggatgagcgaaaaatacatcgtcacctgggacatgttgcagatccatgcacgtaaactcgcaagccgactgatgccttctgaacaatggaaaggcattattgccgtaagccgtggcggtctggtaccgggtgcgttactggcgcgtgaactgggtattcgtcatgtcgataccgtttgtatttccagctacgatcacgacaaccagcgcgagcttaaagtgctgaaacgcgcagaaggcgatggcgaaggcttcatcgttattgatgacctggtggataccggtggtactgcggttgcgattcgtgaaatgtatccaaaagcgcactttgtcaccatcttcgcaaaaccggctggtcgtccgctggttgatgactatgttgttgatatcccgcaagatacctggattgaacagccgtgggatatgggcgtcgtattcgtcccgccaatctccggtcgctaaggatcagcttggcgtaatcaagccgaattctgcagatatccatcacactggcggccgctcgagcatgcatctagagggcccaattcgccctatagtgagtcgtattacaattcactggccgtcgttttacaacgtcgtgactgggaaaaccctggcgttacccaacttaatcgccttgcagcacatccccctttcgccagctggcgtaatagcgaagaggcccgcaccgatcgcccttcccaacagttgcgcagcctgaatggcgaatggacgcgccctgtagcggcgcattaagcgcggcgggtgtggtggttacgcgcagcgtgaccgctacacttgccagcgccctagcgcccgctcctttcgctttcttcccttcctttctcgccacgttcgccggctttccccgtcaagctctaaatcgggggctccctttagggttccgatttagtgctttacggcacctcgaccccaaaaaacttgattagggtgatggttcacgtagtgggccatcgccctgatagacggtttttcgccctttgacgttggagtccacgttctttaatagtggactcttgttccaaactggaacaacactcaaccctatctcggtctattcttttgatttataagggattttgccgatttcggcctattggttaaaaaatgagctgatttaacaaaaatttaacgcgaattttaacaaaattcagggcgcaagggctgctaaaggaagcggaacacgtagaaagccagtccgcagaaacggtgctgaccccggatgaatgtcagctactgggctatctggacaagggaaaacgcaagcgcaaagagaaagcaggtagcttgcagtgggcttacatggcgatagctagactgggcggttttatggacagcaagcgaaccggaattgccagctggggcgccctctggtaaggttgggaagccctgcaaagtaaactggatggctttcttgccgccaaggatctgatggcgcaggggatcaagatctgatcaagagacaggatgaggatcgtttcgcatgattgaacaagatggattgcacgcaggttctccggccgcttgggtggagaggctattcggctatgactgggcacaacagacaatcggctgctctgatgccgccgtgttccggctgtcagcgcaggggcgcccggttctttttgtcaagaccgacctgtccggtgccctgaatgaactgcaggacgaggcagcgcggctatcgtggctggccacgacgggcgttccttgcgcagctgtgctcgacgttgtcactgaagcgggaagggactggctgctattgggcgaagtgccggggcaggatctcctgtcatcccaccttgctcctgccgagaaagtatccatcatggctgatgcaatgcggcggctgcatacgcttgatccggctacctgcccattcgaccaccaagcgaaacatcgcatcgagcgagcacgtactcggatggaagccggtcttgtcgatcaggatgatctggacgaagagcatcaggggctcgcgccagccgaactgttcgccaggctcaaggcgcgcatgcccgacggcgaggatctcgtcgtgacccatggcgatgcctgcttgccgaatatcatggtggaaaatggccgcttttctggattcatcgactgtggccggctgggtgtggcggaccgctatcaggacatagcgttggctacccgtgatattgctgaagagcttggcggcgaatgggctgaccgcttcctcgtgctttacggtatcgccgctcccgattcgcagcgcatcgccttctatcgccttcttgacgagttcttctgaattgaaaaaggaagagtatgagtattcaacatttccgtgtcgcccttattcccttttttgcggcattttgccttcctgtttttgctcacccagaaacgctggtgaaagtaaaagatgctgaagatcagttgggtgcacgagtgggttacatcgaactggatctcaacagcggtaagatccttgagagttttcgccccgaagaacgttttccaatgatgagcacttttaaagttctgctatgtggcgcggtattatcccgtattgacgccgggcaagagcaactcggtcgccgcatacactattctcagaatgacttggttgagtactcaccagtcacagaaaagcatcttacggatggcatgacagtaagagaattatgcagtgctgccataaccatgagtgataacactgcggccaacttacttctgacaacgatcggaggaccgaaggagctaaccgcttttttgcacaacatgggggatcatgtaactcgccttgatcgttgggaaccggagctgaatgaagccataccaaacgacgagcgtgacaccacgatgcctgtagcaatggcaacaacgttgcgcaaactattaactggcgaactacttactctagcttcccggcaacaattaatagactggatggaggcggataaagttgcaggaccacttctgcgctcggcccttccggctggctggtttattgctgataaatctggagccggtgagcgtgggtctcgcggtatcattgcagcactggggccagatggtaagccctcccgtatcgtagttatctacacgacggggagtcaggcaactatggatgaacgaaatagacagatcgctgagataggtgcctcactgattaagcattggtaactgtcagaccaagtttactcatatatactttagattgatttaaaacttcatttttaatttaaaaggatctaggtgaagatcctttttgataatctcatgaccaaaatcccttaacgtgagttttcgttccactgagcgtcagaccccgtagaaaagatcaaaggatcttcttgagatcctttttttctgcgcgtaatctgctgcttgcaaacaaaaaaaccaccgctaccagcggtggtttgtttgccggatcaagagctaccaactctttttccgaaggtaactggcttcagcagagcgcagataccaaatactgttcttctagtgtagccgtagttaggccaccacttcaagaactctgtagcaccgcctacatacctcgctctgctaatcctgttaccagtggctgctgccagtggcgataagtcgtgtcttaccgggttggactcaagacgatagttaccggataaggcgcagcggtcgggctgaacggggggttcgtgcacacagcccagcttggagcgaacgacctacaccgaactgagatacctacagcgtgagctatgagaaagcgccacgcttcccgaagggagaaaggcggacaggtatccggtaagcggcagggtcggaacaggagagcgcacgagggagcttccagggggaaacgcctggtatctttatagtcctgtcgggtttcgccacctctgacttgagcgtcgatttttgtgatgctcgtcaggggggcggagcctatggaaaaacgccagcaacgcggcctttttacggttcctggccttttgctggccttttgctcacatgttctttcctgcgttatcccctgattctgtggataaccgtattaccgcctttgagtgagctgataccgctcgccgcagccgaacgttgtttaattctgtgagcgtatggcaaacg

SEQ ID NO: 232 - DNA, 5975 bp, Artificial Sequence
  pENTR221-MTT2
cttgtacaaagttggcattataagaaagcattgcttatcaatttgttgcaacgaacaggtcactatcagtcaaaataaaatcattatttgccatccagctgatatcccctatagtgagtcgtattacatggtcatagctgtttcctggcagctctggcccgtgtctcaaaatctctgatgttacattgcacaagataaaataatatcatcatgaacaataaaactgtctgcttacataaacagtaatacaaggggtgttatgagccatattcaacgggaaacgtcgaggccgcgattaaattccaacatggatgctgatttatatgggtataaatgggctcgcgataatgtcgggcaatcaggtgcgacaatctatcgcttgtatgggaagcccgatgcgccagagttgtttctgaaacatggcaaaggtagcgttgccaatgatgttacagatgagatggtcagactaaactggctgacggaatttatgcctcttccgaccatcaagcattttatccgtactcctgatgatgcatggttactcaccactgcgatccccggaaaaacagcattccaggtattagaagaatatcctgattcaggtgaaaatattgttgatgcgctggcagtgttcctgcgccggttgcattcgattcctgtttgtaattgtccttttaacagcgatcgcgtatttcgtctcgctcaggcgcaatcacgaatgaataacggtttggttgatgcgagtgattttgatgacgagcgtaatggctggcctgttgaacaagtctggaaagaaatgcataaacttttgccattctcaccggattcagtcgtcactcatggtgatttctcacttgataaccttatttttgacgaggggaaattaataggttgtattgatgttggacgagtcggaatcgcagaccgataccaggatcttgccatcctatggaactgcctcggtgagttttctccttcattacagaaacggctttttcaaaaatatggtattgataatcctgatatgaataaattgcagtttcatttgatgctcgatgagtttttctaatcagaattggttaattggttgtaacactggcagagcattacgctgacttgacgggacggcgcaagctcatgaccaaaatcccttaacgtgagttacgcgtcgttccactgagcgtcagaccccgtagaaaagatcaaaggatcttcttgagatcctttttttctgcgcgtaatctgctgcttgcaaacaaaaaaaccaccgctaccagcggtggtttgtttgccggatcaagagctaccaactctttttccgaaggtaactggcttcagcagagcgcagataccaaatactgttcttctagtgtagccgtagttaggccaccacttcaagaactctgtagcaccgcctacatacctcgctctgctaatcctgttaccagtggctgctgccagtggcgataagtcgtgtcttaccgggttggactcaagacgatagttaccggataaggcgcagcggtcgggctgaacggggggttcgtgcacacagcccagcttggagcgaacgacctacaccgaactgagatacctacagcgtgagctatgagaaagcgccacgcttcccgaagggagaaaggcggacaggtatccggtaagcggcagggtcggaacaggagagcgcacgagggagcttccagggggaaacgcctggtatctttatagtcctgtcgggtttcgccacctctgacttgagcgtcgatttttgtgatgctcgtcaggggggcggagcctatggaaaaacgccagcaacgcggcctttttacggttcctggccttttgctggccttttgctcacatgttctttcctgcgttatcccctgattctgtggataaccgtattaccgcctttgagtgagctgataccgctcgccgcagccgaacgaccgagcgcagcgagtcagtgagcgaggaagcggaagagcgcccaatacgcaaaccgcctctccccgcgcgttggccgattcattaatgcagctggcacgacaggtttcccgactggaaagcgggcagtgagcgcaacgcaattaatacgcgtaccgctagccaggaagagtttgtagaaacgcaaaaaggccatccgtcaggatggccttctgcttagtttgatgcctggcagtttatggcgggcgtcctgcccgccaccctccgggccgttgcttcacaacgttcaaatccgctcccggcggatttgtcctactcaggagagcgttcaccgacaaacaacagataaaacgaaaggcccagtcttccgactgagcctttcgttttatttgatgcctggcagttccctactctcgcgttaacgctagcatggatgttttcccagtcacgacgttgtaaaacgacggccagtcttaagctcgggccccaaataatgattttattttgactgatagtgacctgttcgttgcaacacattgatgagcaatgcttttttataatgccaactttgtacaaaaaagcaggctagcttagtgtaaaacaggctgagagtatttgatgtaagaaggggagtggttatataggtcttagccaaaacatgtgatagtcactccaggggttgctggaaaagaagtctgtgacactcattaacctattggtgcagattttgtatgatctaaaggagaaaatgttcttggctgttttgtattgccttctgtggagtttccagatctctgatggccattttcctcgagcctgtgcctcctctaagaacttgttggcaaaagaatgctgcccaccatggatgggtgatgggagtccctgcggccagctttcaggcagaggttcctgccaggatatccttctgtccagtgcaccatctggacctcagttccccttcaaaggggtggatgaccgtgagtcctggccctctgtgttttataataggacctgccagtgctcaggcaacttcatgggtttcaactgcggaaactgtaagtttggatttgggggcccaaattgtacagagaagcgagtcttgattagaagaaacatttttgatttgagtgtctccgaaaagaataagttcttttcttacctcactttagcaaaacatactatcagctcagtctatgtcatccccacaggcacctatggccaaatgaacaatgggtcaacacccatgtttaatgatatcaacatctacgacctctttgtatggatgcattactatgtgtcaagggacacactgcttgggggctctgaaatatggagggacattgattttgcccatgaagcaccagggtttctgccttggcacagacttttcttgttattgtgggaacaagaaattcgagaactaactggggatgagaacttcactgttccatactgggattggagagatgcagaaaactgtgacatttgcacagatgagtacttgggaggtcgtcaccctgaaaatcctaacttactcagcccagcatccttcttctcctcctggcagatcatttgtagcagatcagaagagtataatagccatcaggttttatgcgatggaacacctgagggaccactattacgtaatcctggaaaccatgacaaagccaaaacccccaggctcccatcttcagcagatgtggaattttgtctgagtttgacccagtatgaatctggatcaatggatagaactgccaatttcagctttagaaacacactggaaggatttgccagtccactcacagggatagcagatccttctcaaagtagcatgcacaatgccttacatatctttatgaatggaacaatgtcccaagtacagggatcggccaacgatcccatttttcttcttcaccatgcttttgtggacagtatttttgaacaatggctgcgaaggcaccgccctcttttggaagtttacccagaagccaatgcacctatcggccataacagagactcttacatggttcctttcataccgctctatagaaatggtgatttcttcataacatccaaggatctgggatatgactacagctacctccaagagtcagatccaggcttttacagaaattatattgagccttacttggaacaagccagtcgtatctggccatggcttcttggggcagcactggtgggagctgttattgctgcagctctctctgggcttagcagtaggctatgccttcagaagaagaagaagaagaagcaaccccaggaggaaaggcagccactcctcatggacaaagacgactaccacagcttgctgtatcagagccatctggagggcagaggcagcctgctcacctgcggagacgtcgaagagaatcctgggcccatgagtgctcctaaactcctctctctgggctgtatcttcttccccttgctactttttcagcaggcccgggctcaattcccaagacagtgtgccactgttgaggctttgagaagtggtatgtgttgcccagacctgtcccctgtgtctgggcctgggacagaccgctgtggctcatcatcagggaggggcagatgtgaggcagtgactgcagactcccggccccacagccctcagtatccccatgatggcagagatgatcgggaggtctggcccttgcgcttcttcaataggacatgtcactgcaacggcaatttctcaggacacaactgtgggacgtgccgtcctggctggagaggagctgcctgtgaccagagggttctcatagtcaggagaaatcttctggacttaagtaaagaagaaaagaaccactttgtccgggccctggatatggcaaagcgcacaactcaccctttatttgtcattgccaccaggagatcagaagaaatactggggccagatggcaacacgccacaatttgagaacatttccatttataactactttgtttggacacactattactcagtcaaaaagactttccttggggtaggacaggaaagctttggtgaagtggatttctctcatgagggaccagcttttctcacatggcacaggtaccacctcctgcgtctggagaaagacatgcaggaaatgttgcaagagccttctttctcccttccttactggaattttgcaacggggaaaaatgtctgtgatatctgcacggatgacttgatgggatccagaagcaactttgattccactctaataagcccaaactctgtcttttctcaatggcgagtggtctgtgactccttggaagattatgataccctgggaacactttgtaacagcaccgaggatgggccaattaggagaaatccagctggaaatgtggccagaccaatggtgcaacgtcttcctgaaccacaggatgtcgctcagtgcttggaagttggtttatttgacacgcctcctttttattccaactctacaaacagtttccgaaacacagtggaaggttacagtgaccccacgggaaagtatgaccctgctgttcgaagtcttcacaatttggctcatctattcctgaatggaacagggggacaaacccatttgtctccaaatgatcctatttttgtcctcctgcacaccttcacagatgcagtctttgatgaatggctgaggagatacaatgctgatatatccacatttccattggaaaatgcccctattggacataatagacaatacaacatggtgccattctggcccccagtcaccaacacagaaatgtttgttactgctccagacaacctgggatacacttatgaaattcaatggccaagtcgggagtttagtgtacctgagataattgccatagcagtagttggcgctttgttactggttgcactcatttttgggactgcttcttatctgattcgtgccagacgcagtatggatgaagctaaccagcctctcctcactgatcagtatcaatgctatgctgaagaatatgaaaaactccagaatcctaatcagtctgtggtctaacaaacccagcttt

SEQ ID NO: 233 - DNA, 6820 bp, Artificial Sequence
  pCR-BluntII-TOPO-SalI-tetO-mTyr-E2A-hTyrp1-inverse
agcgcccaatacgcaaaccgcctctccccgcgcgttggccgattcattaatgcagctggcacgacaggtttcccgactggaaagcgggcagtgagcgcaacgcaattaatgtgagttagctcactcattaggcaccccaggctttacactttatgcttccggctcgtatgttgtgtggaattgtgagcggataacaatttcacacaggaaacagctatgaccatgattacgccaagctatttaggtgacactatagaatactcaagctatgcatcaagcttggtaccgagctcggatccactagtaacggccgccagtgtgctggaattcgcccttaattaattattagaccacagactgattaggattctggagtttttcatattcttcagcatagcattgatactgatcagtgaggagaggctggttagcttcatccatactgcgtctggcacgaatcagataagaagcagtcccaaaaatgagtgcaaccagtaacaaagcgccaactactgctatggcaattatctcaggtacactaaactcccgacttggccattgaatttcataagtgtatcccaggttgtctggagcagtaacaaacatttctgtgttggtgactgggggccagaatggcaccatgttgtattgtctattatgtccaataggggcattttccaatggaaatgtggatatatcagcattgtatctcctcagccattcatcaaagactgcatctgtgaaggtgtgcaggaggacaaaaataggatcatttggagacaaatgggtttgtccccctgttccattcaggaatagatgagccaaattgtgaagacttcgaacagcagggtcatactttcccgtggggtcactgtaaccttccactgtgtttcggaaactgtttgtagagttggaataaaaaggaggcgtgtcaaataaaccaacttccaagcactgagcgacatcctgtggttcaggaagacgttgcaccattggtctggccacatttccagctggatttctcctaattggcccatcctcggtgctgttacaaagtgttcccagggtatcataatcttccaaggagtcacagaccactcgccattgagaaaagacagagtttgggcttattagagtggaatcaaagttgcttctggatcccatcaagtcatccgtgcagatatcacagacatttttccccgttgcaaaattccagtaaggaagggagaaagaaggctcttgcaacatttcctgcatgtctttctccagacgcaggaggtggtacctgtgccatgtgagaaaagctggtccctcatgagagaaatccacttcaccaaagctttcctgtcctaccccaaggaaagtctttttgactgagtaatagtgtgtccaaacaaagtagttataaatggaaatgttctcaaattgtggcgtgttgccatctggccccagtatttcttctgatctcctggtggcaatgacaaataaagggtgagttgtgcgctttgccatatccagggcccggacaaagtggttcttttcttctttacttaagtccagaagatttctcctgactatgagaaccctctggtcacaggcagctcctctccagccaggacggcacgtcccacagttgtgtcctgagaaattgccgttgcagtgacatgtcctattgaagaagcgcaagggccagacctcccgatcatctctgccatcatggggatactgagggctgtggggccgggagtctgcagtcactgcctcacatctgcccctccctgatgatgagccacagcggtctgtcccaggcccagacacaggggacaggtctgggcaacacataccacttctcaaagcctcaacagtggcacactgtcttgggaattgagcccgggcctgctgaaaaagtagcaaggggaagaagatacagcccagagagaggagtttaggagcactcatgggcccaggattctcttcgacgtctccgcaggtgagcaggctgcctctgccctccagatggctctgatacagcaagctgtggtagtcgtctttgtccatgaggagtggctgcctttcctcctggggttgcttcttcttcttcttcttctgaaggcatagcctactgctaagcccagagagagctgcagcaataacagctcccaccagtgctgccccaagaagccatggccagatacgactggcttgttccaagtaaggctcaatataatttctgtaaaagcctggatctgactcttggaggtagctgtagtcatatcccagatccttggatgttatgaagaaatcaccatttctatagagcggtatgaaaggaaccatgtaagagtctctgttatggccgataggtgcattggcttctgggtaaacttccaaaagagggcggtgccttcgcagccattgttcaaaaatactgtccacaaaagcatggtgaagaagaaaaatgggatcgttggccgatccctgtacttgggacattgttccattcataaagatatgtaaggcattgtgcatgctactttgagaaggatctgctatccctgtgagtggactggcaaatccttccagtgtgtttctaaagctgaaattggcagttctatccattgatccagattcatactgggtcaaactcagacaaaattccacatctgctgaagatgggagcctgggggttttggctttgtcatggtttccaggattacgtaatagtggtccctcaggtgttccatcgcataaaacctgatggctattatactcttctgatctgctacaaatgatctgccaggaggagaagaaggatgctgggctgagtaagttaggattttcagggtgacgacctcccaagtactcatctgtgcaaatgtcacagttttctgcatctctccaatcccagtatggaacagtgaagttctcatccccagttagttctcgaatttcttgttcccacaataacaagaaaagtctgtgccaaggcagaaaccctggtgcttcatgggcaaaatcaatgtccctccatatttcagagcccccaagcagtgtgtcccttgacacatagtaatgcatccatacaaagaggtcgtagatgttgatatcattaaacatgggtgttgacccattgttcatttggccataggtgcctgtggggatgacatagactgagctgatagtatgttttgctaaagtgaggtaagaaaagaacttattcttttcggagacactcaaatcaaaaatgtttcttctaatcaagactcgcttctctgtacaatttgggcccccaaatccaaacttacagtttccgcagttgaaacccatgaagttgcctgagcactggcaggtcctattataaaacacagagggccaggactcacggtcatccacccctttgaaggggaactgaggtccagatggtgcactggacagaaggatatcctggcaggaacctctgcctgaaagctggccgcagggactcccatcacccatccatggtgggcagcattcttttgccaacaagttcttagaggaggcacaggctcgaggaaaatggccatcagagatctggaaactccacagaaggcaatacaaaacagccaagaacattctctatcactgatagggagtcgacaagggcgaattctgcagatatccatcacactggcggccgctcgagcatgcatctagagggcccaattcgccctatagtgagtcgtattacaattcactggccgtcgttttacaacgtcgtgactgggaaaaccctggcgttacccaacttaatcgccttgcagcacatccccctttcgccagctggcgtaatagcgaagaggcccgcaccgatcgcccttcccaacagttgcgcagcctatacgtacggcagtttaaggtttacacctataaaagagagagccgttatcgtctgtttgtggatgtacagagtgatattattgacacgccggggcgacggatggtgatccccctggccagtgcacgtctgctgtcagataaagtctcccgtgaactttacccggtggtgcatatcggggatgaaagctggcgcatgatgaccaccgatatggccagtgtgccggtctccgttatcggggaagaagtggctgatctcagccaccgcgaaaatgacatcaaaaacgccattaacctgatgttctggggaatataaatgtcaggcatgagattatcaaaaaggatcttcacctagatccttttcacgtagaaagccagtccgcagaaacggtgctgaccccggatgaatgtcagctactgggctatctggacaagggaaaacgcaagcgcaaagagaaagcaggtagcttgcagtgggcttacatggcgatagctagactgggcggttttatggacagcaagcgaaccggaattgccagctggggcgccctctggtaaggttgggaagccctgcaaagtaaactggatggctttctcgccgccaaggatctgatggcgcaggggatcaagctctgatcaagagacaggatgaggatcgtttcgcatgattgaacaagatggattgcacgcaggttctccggccgcttgggtggagaggctattcggctatgactgggcacaacagacaatcggctgctctgatgccgccgtgttccggctgtcagcgcaggggcgcccggttctttttgtcaagaccgacctgtccggtgccctgaatgaactgcaagacgaggcagcgcggctatcgtggctggccacgacgggcgttccttgcgcagctgtgctcgacgttgtcactgaagcgggaagggactggctgctattgggcgaagtgccggggcaggatctcctgtcatctcaccttgctcctgccgagaaagtatccatcatggctgatgcaatgcggcggctgcatacgcttgatccggctacctgcccattcgaccaccaagcgaaacatcgcatcgagcgagcacgtactcggatggaagccggtcttgtcgatcaggatgatctggacgaagagcatcaggggctcgcgccagccgaactgttcgccaggctcaaggcgagcatgcccgacggcgaggatctcgtcgtgacccatggcgatgcctgcttgccgaatatcatggtggaaaatggccgcttttctggattcatcgactgtggccggctgggtgtggcggaccgctatcaggacatagcgttggctacccgtgatattgctgaagagcttggcggcgaatgggctgaccgcttcctcgtgctttacggtatcgccgctcccgattcgcagcgcatcgccttctatcgccttcttgacgagttcttctgaattattaacgcttacaatttcctgatgcggtattttctccttacgcatctgtgcggtatttcacaccgcatacaggtggcacttttcggggaaatgtgcgcggaacccctatttgtttatttttctaaatacattcaaatatgtatccgctcatgagacaataaccctgataaatgcttcaataatagcacgtgaggagggccaccatggccaagttgaccagtgccgttccggtgctcaccgcgcgcgacgtcgccggagcggtcgagttctggaccgaccggctcgggttctcccgggacttcgtggaggacgacttcgccggtgtggtccgggacgacgtgaccctgttcatcagcgcggtccaggaccaggtggtgccggacaacaccctggcctgggtgtgggtgcgcggcctggacgagctgtacgccgagtggtcggaggtcgtgtccacgaacttccgggacgcctccgggccggccatgaccgagatcggcgagcagccgtgggggcgggagttcgccctgcgcgacccggccggcaactgcgtgcacttcgtggccgaggagcaggactgacacgtgctaaaacttcatttttaatttaaaaggatctaggtgaagatcctttttgataatctcatgaccaaaatcccttaacgtgagttttcgttccactgagcgtcagaccccgtagaaaagatcaaaggatcttcttgagatcctttttttctgcgcgtaatctgctgcttgcaaacaaaaaaaccaccgctaccagcggtggtttgtttgccggatcaagagctaccaactctttttccgaaggtaactggcttcagcagagcgcagataccaaatactgtccttctagtgtagccgtagttaggccaccacttcaagaactctgtagcaccgcctacatacctcgctctgctaatcctgttaccagtggctgctgccagtggcgataagtcgtgtcttaccgggttggactcaagacgatagttaccggataaggcgcagcggtcgggctgaacggggggttcgtgcacacagcccagcttggagcgaacgacctacaccgaactgagatacctacagcgtgagctatgagaaagcgccacgcttcccgaagggagaaaggcggacaggtatccggtaagcggcagggtcggaacaggagagcgcacgagggagcttccagggggaaacgcctggtatctttatagtcctgtcgggtttcgccacctctgacttgagcgtcgatttttgtgatgctcgtcaggggggcggagcctatggaaaaacgccagcaacgcggcctttttacggttcctgggcttttgctggccttttgctcacatgttctttcctgcgttatcccctgattctgtggataaccgtattaccgcctttgagtgagctgataccgctcgccgcagccgaacgaccgagcgcagcgagtcagtgagcgaggaagcggaag

SEQ ID NO: 234 - DNA, 30 bp, Artificial Sequence
  hNIS-5 primer
gtcgaccaccatggaggccgtggagaccgg

SEQ ID NO: 235 - DNA, 36 bp, Artificial Sequence
  hNIS-3 primer
ttaattaatcagaggtttgtctcctgctggtctcga

SEQ ID NO: 236 - DNA, 31 bp, Artificial Sequence
  hNIS-a5 primer
cccagaccagtacatgcctctgctggtgctg

SEQ ID NO: 237 - DNA, 30 bp, Artificial Sequence
  hNIS-a3 primer
gaggcatgtactggtctggggcagagatgc

SEQ ID NO: 238 - DNA, 8 bp, Artificial Sequence
  SBFI restriction site
cctgcagg

SEQ ID NO: 239 - DNA, 8 bp, Artificial Sequence
  NotI restriction site
gcggccgc

SEQ ID NO: 240 - DNA, 8 bp, Artificial Sequence
  SgrAI restriction site
crccggyg

SEQ ID NO: 241 - DNA, 6 bp, Artificial Sequence
  SmaI/TspMI/XmaI restriction site
cccggg

SEQ ID NO: 242 - DNA, 6 bp, Artificial Sequence
  ApaI/PspOMI restriction site
gggccc
